(19) United States
(12) Patent Application Publication
(10) Pub. No.: US 2025/0009873 A1
(43) Pub. Date: Jan. 9, 2025

(54) METHODS OF PREVENTING, TREATING, OR REDUCING THE SEVERITY OF COVID-19 IN IMMUNOCOMPROMISED BLOOD CANCER PATIENTS

(71) Applicant: CITY OF HOPE, Duarte, CA (US)

(72) Inventors: Don J. DIAMOND, Duarte, CA (US); Flavia CHIUPPESI, Duarte, CA (US)

(73) Assignee: CITY OF HOPE, Duarte, CA (US)

(21) Appl. No.: 18/711,088

(22) PCT Filed: Nov. 17, 2022
(86) PCT No.: PCT/US2022/080073

§ 371 Date: May 16, 2024

Related U.S. Application Data
(60) Provisional application No. 63/280,557, filed on Nov. 17, 2021.
(60) Provisional application No. 63/280,561, filed on Nov. 17, 2021.

(51) Int. Cl. A61K 39/215; A61K 39/00; A61P 37/04; C07K 14/005

(52) U.S. Cl. CPC A61K 39/215; A61P 37/04; C07K 14/005; A61K 2039/53; C12N 2770/20022; C12N 2770/20034; C12N 2770/20071

(57) ABSTRACT

Disclosed are methods of preventing or treating a coronavirus infection in a blood cancer patient having received a cellular therapy by administration of a synthetic MVA-based vaccine.

### CROSS-REFERENCE TO RELATED APPLICATIONS

[0001] This application claims the benefit of U.S. Provisional Patent Application No. 63/280,557, filed on Nov. 17, 2021, and U.S. Provisional Patent Application No. 63/280,561, filed on Nov. 17, 2021, the entire contents of each of which are incorporated by reference.

### SEQUENCE LISTING

[0002] This application contains a Sequence Listing, which was submitted in XML format via Patent Center, and is hereby incorporated by reference in its entirety. The XML copy, created on Nov. 16, 2022, is named 0544358221WO00.xml and is 590 KB in size.

### BACKGROUND

[0003] On Feb. 4, 2020, the Secretary of Health and Human Services (HHS) determined that there was a public health emergency concerning the spread of a novel coronavirus, later named “severe acute respiratory syndrome coronavirus 2” (SARS-CoV-2), and the disease it causes has been named “Coronavirus Disease 2019” (COVID-19). Since then, SARS-CoV-2 has caused a global pandemic with almost 250M cases and 5M fatalities (as of Nov. 1, 2021). Preventing the incidence of COVID-2019-associated morbidity and mortality while allowing a return to normal activities may best be accomplished by prophylactic vaccination against SARS-CoV-2. Spike (S)-based vaccines appear to protect from hospitalization and severe disease, yet, as virus variants arise with mutations primarily within the virus S-protein, there is concern that vaccine-induced immunity might be insufficient to control disease. To hasten the end of the pandemic and protect against the spread of variants, a preventative SARS-CoV-2 vaccine, COH04S1, which targets both S- and the less variant prone nucleocapsid (N) protein, was developed.

[0004] Following the emergence of Alpha (B.1.1.7), Beta (B.1.351), Gamma (P.1), and Delta (B.1.617), Omicron subvariants have emerged as predominant SARS-CoV-2 VOC, which includes BA.1, BA.2, BA.2 sub-lineages such as BA.2.12.1, BA.4, BA.5, BA.2.75, and more recent subvariants such as BQ.1, BQ.1.1, AND XBB. Omicron subvariants have exceptional capacity to evade neutralizing antibodies (NAb) due to numerous mutations in the S protein that dramatically exceed S mutations of other earlier occurring SARS-CoV-2 VOC, thereby posing a unique challenge for COVID-19 vaccination. Several studies reported reduced clinical effectiveness against Omicron variants by approved COVID-19 vaccines, which were designed to elicit protective immunity solely based on the S protein of the Wuhan-Hu-1 reference strain. While waning vaccine efficacy against VOC can be counteracted by repeated booster vaccination, COVID-19 booster vaccines with altered or variant-matched antigen design have been developed to specifically enhance the stimulation of cross-protective immunity against emerging SARS-CoV-2 VOC.

[0005] The Centers for Disease Control and Prevention (CDC) lists immunocompromised patients such as hematology patients who received therapeutic procedures for hematologic malignancy as high risk for COVID-19. SARS-CoV-2 infection is expected to be very serious in the vulnerable population of hematology patients, including recipients of autologous (auto) and/or allogeneic (allo) hematopoietic cell transplant (HCT), and recipients of chimeric antigen receptor (CAR)-T cell therapy. Due to their immunocompromised status, hematology patients are at increased risk for severe COVID-19 disease, including respiratory complications and exacerbated lethality of the infection. There is very limited data and multiple critical gaps in our knowledge of the epidemiology and clinical manifestations of COVID-19 in hematology patients. Given the serious impact of other respiratory viruses in this vulnerable patient population, it is anticipated that hematology recipients of cell therapy may develop severe clinical disease, profoundly impacting the therapy outcomes, such as morbidity and survival.

[0006] As of Jan. 25, 2021, the Center for International Blood and Marrow Transplant Research (CIBMTR; www.cibmtr.org/Covid19/Pages/default.aspx) reported 1362 COVID-19 infections in HCT recipients, with a ˜15% mortality rate (195 deaths), as communicated by 200 CIBMTR participating centers (162 US, 38 non-US). Currently, there are several drugs and investigational agents being evaluated in clinical trials in many nations, and other agents may be available through compassionate use programs. Nonetheless, no treatment has been proven effective against newer variants. Moreover, most trials require patients to be off immunosuppression for a certain period of time to be eligible. This may not be feasible in patients who are receiving therapy for hematologic malignancy. It is unclear how the different SARS-CoV-2 vaccine candidates and emergency use authorization (EUA) vaccines will specifically affect different forms of immune abnormalities. Given the diversity of various immunocompromised patient populations, it is possible that candidate SARS-CoV-2 vaccines may differ in their efficacy and safety for these patients.

[0007] Despite a high vaccination rate, patients with malignant disease may be at high risk for lethal COVID-19 infection due to poor immune response to COVID-19 infections or vaccination. This disclosure provides vaccines using a synthetic MVA platform for preventing COVID-19 in these patients, as well as for preventing or lessening the severity of COVID-19 in immunocompromised blood cancer patients.

### SUMMARY

[0008] The present technologies provide methods of vaccinating or protecting against a coronavirus infection, or preventing or treating COVID-19, in an immunocompromised subject, for example, a blood cancer patient who has received a cellular therapy, by administration of a synthetic MVA-based vaccine.

[0009] In some aspects, provided are methods of vaccinating or protecting a subject against coronavirus disease 2019 (COVID-19) caused by a coronavirus infection, comprising administering to the subject a composition comprising a synthetic MVA (sMVA) vector comprising or capable of expressing one or more DNA sequences encoding a spike (S) protein and a nucleocapsid (N) protein or variants or mutants thereof, wherein the subject is a blood cancer patient that has been treated for a hematological malignancy with a cellular therapy.

[0010] In some aspects, provided are methods of preventing a coronavirus infection in a subject, comprising administering to the subject a composition comprising a synthetic MVA (sMVA) vector comprising or capable of expressing one or more DNA sequences encoding a spike (S) protein and a nucleocapsid (N) protein or variants or mutants thereof, wherein the subject is a blood cancer patient that has been treated for a hematological malignancy with a cellular therapy.

[0011] In some aspects, provided are methods of preventing, treating, or reducing the severity of COVID-19 caused by a coronavirus infection in a subject, comprising administering to the subject a composition comprising a synthetic MVA (sMVA) vector comprising or capable of expressing one or more DNA sequences encoding a spike (S) protein and a nucleocapsid (N) protein or variants or mutants thereof, wherein the subject is a blood cancer patient that has been treated for a hematological malignancy with a cellular therapy.

[0012] In some aspects, provided are methods of treating COVID-19 caused by a coronavirus infection in a subject, comprising administering to the subject a composition comprising a synthetic MVA (sMVA) vector comprising or capable of expressing one or more DNA sequences encoding a spike (S) protein and a nucleocapsid (N) protein or variants or mutants thereof, wherein the subject is a blood cancer patient that has been treated for a hematological malignancy with a cellular therapy.

[0013] In some aspects, provided are methods of vaccinating or protecting a subject against coronavirus disease 2019 (COVID-19) caused by a coronavirus infection, comprising administering to the subject a composition comprising a synthetic MVA (sMVA) vector comprising or capable of expressing one or more DNA sequences encoding a spike (S) protein and a nucleocapsid (N) protein or variants or mutants thereof, wherein the subject is a blood cancer patient who has had or is likely to have a poor immune response to a different COVID-19 vaccination.

[0014] In some aspects, provided are methods of preventing a coronavirus infection in a subject, comprising administering to the subject a composition comprising a synthetic MVA (sMVA) vector comprising or capable of expressing one or more DNA sequences encoding a spike (S) protein and a nucleocapsid (N) protein or variants or mutants thereof, wherein the subject is a blood cancer patient who has had or is likely to have a poor immune response to a different COVID-19 vaccination.

[0015] In some aspects, provided are methods of preventing, treating, or reducing the severity of COVID-19 caused by a coronavirus infection in a subject, comprising administering to the subject a composition comprising a synthetic MVA (sMVA) vector comprising or capable of expressing one or more DNA sequences encoding a spike (S) protein and a nucleocapsid (N) protein or variants or mutants thereof, wherein the subject is a blood cancer patient who has had or is likely to have a poor immune response to a different COVID-19 vaccination.

[0016] In some aspects, provided are methods of treating COVID-19 caused by a coronavirus infection in a subject, comprising administering to the subject a composition comprising a synthetic MVA (sMVA) vector comprising or capable of expressing one or more DNA sequences encoding a spike (S) protein and a nucleocapsid (N) protein or variants or mutants thereof, wherein the subject is a blood cancer patient who has had or is likely to have a poor immune response to a different COVID-19 vaccination.

[0017] In some aspects, provided are compositions for use in a method of vaccinating or protecting a subject against coronavirus disease 2019 (COVID-19) caused by a coronavirus infection, wherein the composition comprises a synthetic MVA (sMVA) vector comprising or capable of expressing one or more DNA sequences encoding a spike (S) protein and a nucleocapsid (N) protein or variants or mutants thereof, and wherein the subject is a blood cancer patient that has been treated for a hematological malignancy with a cellular therapy.

[0018] In some aspects, provided are compositions for use in a method of preventing a coronavirus infection in a subject, wherein the composition comprises a synthetic MVA (sMVA) vector comprising or capable of expressing one or more DNA sequences encoding a spike (S) protein and a nucleocapsid (N) protein or variants or mutants thereof, and wherein the subject is a blood cancer patient that has been treated for a hematological malignancy with a cellular therapy.

[0019] In some aspects, provided are compositions for use in a method of preventing, treating, or reducing the severity of COVID-19 caused by a coronavirus infection in a subject, wherein the composition comprises a synthetic MVA (sMVA) vector comprising or capable of expressing one or more DNA sequences encoding a spike (S) protein and a nucleocapsid (N) protein or variants or mutants thereof, and wherein the subject is a blood cancer patient that has been treated for a hematological malignancy with a cellular therapy.

[0020] In some aspects, provided are compositions for use in a method of treating COVID-19 caused by a coronavirus infection in a subject, wherein the composition comprises a synthetic MVA (sMVA) vector comprising or capable of expressing one or more DNA sequences encoding a spike (S) protein and a nucleocapsid (N) protein or variants or mutants thereof, and wherein the subject is a blood cancer patient that has been treated for a hematological malignancy with a cellular therapy.

[0021] In some aspects, provided are compositions for use in a method of vaccinating or protecting a subject against coronavirus disease 2019 (COVID-19) caused by a coronavirus infection, wherein the composition comprises a synthetic MVA (sMVA) vector comprising or capable of expressing one or more DNA sequences encoding a spike (S) protein and a nucleocapsid (N) protein or variants or mutants thereof, and wherein the subject is a blood cancer patient who has had or is likely to have a poor immune response to a different COVID-19 vaccination.

[0022] In some aspects, provided are compositions for use in a method of preventing a coronavirus infection in a subject, wherein the composition comprises a synthetic MVA (sMVA) vector comprising or capable of expressing one or more DNA sequences encoding a spike (S) protein and a nucleocapsid (N) protein or variants or mutants thereof, and wherein the subject is a blood cancer patient who has had or is likely to have a poor immune response to a different COVID-19 vaccination.

[0023] In some aspects, provided are compositions for use in a method of preventing, treating, or reducing the severity of COVID-19 caused by a coronavirus infection in a subject, wherein the composition comprises a synthetic MVA (sMVA) vector comprising or capable of expressing one or more DNA sequences encoding a spike (S) protein and a nucleocapsid (N) protein or variants or mutants thereof, and wherein the subject is a blood cancer patient who has had or is likely to have a poor immune response to a different COVID-19 vaccination.

[0024] In some aspects, provided are compositions for use in a method of treating COVID-19 caused by a coronavirus infection in a subject, wherein the composition comprises a synthetic MVA (sMVA) vector comprising or capable of expressing one or more DNA sequences encoding a spike (S) protein and a nucleocapsid (N) protein or variants or mutants thereof, and wherein the subject is a blood cancer patient who has had or is likely to have a poor immune response to a different COVID-19 vaccination.

[0025] In some embodiments, the cellular therapy is selected from the group consisting of an autologous hematopoietic cell transplant, an allogeneic hematopoietic cell transplant, a chimeric antigen receptor (CAR)-T cell therapy, and a combination thereof.

[0026] In some embodiments, the subject received the cellular therapy at least 1 week, at least 2 weeks, at least 3 weeks, at least 4 weeks, at least 1 month, at least 2 months, at least 3 months, at least 4 months, at least 5 months, at least 6 months, at least 7 months, at least 8 months, at least 9 months, at least 10 months, at least 11 months, or at least 12 months prior to administration of the composition.

[0027] In some embodiments, the coronavirus infection is caused by the Wuhan-Hu-1 reference strain or a variant of concern (VOC) selected from the group consisting of B.1.1.7 (Alpha), B.1.351 (Beta), P.1 (Gamma), B.1.617.2 (Delta), B.1.621 (Mu), C.37 (Lambda), C.1.2, BA.1 (Omicron), BA.2 (Omicron), BA.2.12.1 (Omicron), BA.4 (Omicron), BA.5 (Omicron), BA.2.75 (Omicron), BQ.1 (Omicron), BQ.1.1 (Omicron), and XBB (Omicron).

[0028] In some embodiments, the composition is administered by intramuscular injection, intranasal instillation, intradermal injection, and/or scarification.

[0029] In some embodiments, the composition is administered to the subject in a single dose, two doses, three doses, four doses, or more than four doses.

[0030] In some embodiments, the composition is administered to the subject in a prime dose followed by one or more booster doses.

[0031] In some embodiments, an interval between the prime dose and the first booster dose is about 3 weeks, about 4 weeks, about 5 weeks, about 6 weeks, about 7 weeks, about 8 weeks, about 9 weeks, about 10 weeks, about 11 weeks, about 12 weeks, about 13 weeks, about 14 weeks, about 15 weeks, or about 16 weeks.

[0032] In some embodiments, the prime dose is between 1.0×10⁷ PFU/dose and 5.0×10⁸ PFU/dose, for example, about 1.0×10⁷ PFU/dose, about 1.5×10⁷ PFU/dose, about 2.0×10⁷ PFU/dose, about 2.5×10⁷ PFU/dose, about 3.0×10⁷ PFU/dose, about 3.5×10⁷ PFU/dose, about 4.0×10⁷ PFU/dose, about 4.5×10⁷ PFU/dose, about 5.0×10⁷ PFU/dose, about 5.5×10⁷ PFU/dose, about 6.0×10⁷ PFU/dose, about 6.5×10⁷ PFU/dose, about 7.0×10⁷ PFU/dose, about 7.5×10⁷ PFU/dose, about 8.0×10⁷ PFU/dose, about 8.5×10⁷ PFU/dose, about 9.0×10⁷ PFU/dose, about 9.5×10⁷ PFU/dose, about 1.0×10⁸ PFU/dose, about 1.5×10⁸ PFU/dose, about 2.0×10⁸ PFU/dose, about 2.5×10⁸ PFU/dose, about 3.0×10⁸ PFU/dose, about 3.5×10⁸ PFU/dose, about 4.0×10⁸ PFU/dose, about 4.5×10⁸ PFU/dose, or about 5.0×10⁸ PFU/dose. In some embodiments, the prime dose is about 1.0×10⁷ PFU/dose. In some embodiments, the prime dose is about 1.5×10⁷ PFU/dose. In some embodiments, the prime dose is about 2.0×10⁷ PFU/dose. In some embodiments, the prime dose is about 2.5×10⁷ PFU/dose. In some embodiments, the prime dose is about 3.0×10⁷ PFU/dose. In some embodiments, the prime dose is about 3.5×10⁷ PFU/dose. In some embodiments, the prime dose is about 4.0×10⁷ PFU/dose. In some embodiments, the prime dose is about 4.5×10⁷ PFU/dose. In some embodiments, the prime dose is about 5×10⁷ PFU/dose. In some embodiments, the prime dose is about 5.5×10⁷ PFU/dose. In some embodiments, the prime dose is about 6×10⁷ PFU/dose. In some embodiments, the prime dose is about 6.5×10⁷ PFU/dose. In some embodiments, the prime dose is about 7×10⁷ PFU/dose. In some embodiments, the prime dose is about 7.5×10⁷ PFU/dose. In some embodiments, the prime dose is about 8×10⁷ PFU/dose. In some embodiments, the prime dose is about 8.5×10⁷ PFU/dose. In some embodiments, the prime dose is about 9×10⁷ PFU/dose. In some embodiments, the prime dose is about 9.5×10⁷ PFU/dose. In some embodiments, the prime dose is about 1×10⁸ PFU/dose. In some embodiments, the prime dose is about 1.5×10⁸ PFU/dose. In some embodiments, the prime dose is about 2×10⁸ PFU/dose. In some embodiments, the prime dose is about 2.5×10⁸ PFU/dose. In some embodiments, the prime dose is about 3×10⁸ PFU/dose. In some embodiments, the prime dose is about 3.5×10⁸ PFU/dose. In some embodiments, the prime dose is about 4×10⁸ PFU/dose. In some embodiments, the prime dose is about 4.5×10⁸ PFU/dose. In some embodiments, the prime dose is about 5×10⁸ PFU/dose.

[0033] In some embodiments, the booster dose is between 1.0×10⁷ PFU/dose and 5.0×10⁸ PFU/dose, for example, about 1.0×10⁷ PFU/dose, about 1.5×10⁷ PFU/dose, about 2.0×10⁷ PFU/dose, about 2.5×10⁷ PFU/dose, about 3.0×10⁷ PFU/dose, about 3.5×10⁷ PFU/dose, about 4.0×10⁷ PFU/dose, about 4.5×10⁷ PFU/dose, about 5.0×10⁷ PFU/dose, about 5.5×10⁷ PFU/dose, about 6.0×10⁷ PFU/dose, about 6.5×10⁷ PFU/dose, about 7.0×10⁷ PFU/dose, about 7.5×10⁷ PFU/dose, about 8.0×10⁷ PFU/dose, about 8.5×10⁷ PFU/dose, about 9.0×10⁷ PFU/dose, about 9.5×10⁷ PFU/dose, about 1.0×10⁸ PFU/dose, about 1.5×10⁸ PFU/dose, about 2.0×10⁸ PFU/dose, about 2.5×10⁸ PFU/dose, about 3.0×10⁸ PFU/dose, about 3.5×10⁸ PFU/dose, about 4.0×10⁸ PFU/dose, about 4.5×10⁸ PFU/dose, or about 5.0×10⁸ PFU/dose. In some embodiments, the booster dose is about 1.0×10⁷ PFU/dose. In some embodiments, the booster dose is about 1.5×10⁷ PFU/dose. In some embodiments, the booster dose is about 2.0×10⁷ PFU/dose. In some embodiments, the booster dose is about 2.5×10⁷ PFU/dose. In some embodiments, the booster dose is about 3.0×10⁷ PFU/dose. In some embodiments, the booster dose is about 3.5×10⁷ PFU/dose. In some embodiments, the booster dose is about 4.0×10⁷ PFU/dose. In some embodiments, the booster dose is about 4.5×10⁷ PFU/dose. In some embodiments, the booster dose is about 5×10⁷ PFU/dose. In some embodiments, the booster dose is about 5.5×10⁷ PFU/dose. In some embodiments, the booster dose is about 6×10⁷ PFU/dose. In some embodiments, the booster dose is about 6.5×10⁷ PFU/dose. In some embodiments, the booster dose is about 7×10⁷ PFU/dose. In some embodiments, the booster dose is about 7.5×10⁷ PFU/dose. In some embodiments, the booster dose is about 8×10⁷ PFU/dose. In some embodiments, the booster dose is about 8.5×10⁷ PFU/dose. In some embodiments, the booster dose is about 9×10⁷ PFU/dose. In some embodiments, the booster dose is about 9.5×10⁷ PFU/dose. In some embodiments, the booster dose is about 1×10⁸ PFU/dose. In some embodiments, the booster dose is about 1.5×10⁸ PFU/dose. In some embodiments, the booster dose is about 2×10⁸ PFU/dose. In some embodiments, the booster dose is about 2.5×10⁸ PFU/dose. In some embodiments, the booster dose is about 3×10⁸ PFU/dose. In some embodiments, the booster dose is about 3.5×10⁸ PFU/dose. In some embodiments, the booster dose is about 4×10⁸ PFU/dose. In some embodiments, the booster dose is about 4.5×10⁸ PFU/dose. In some embodiments, the booster dose is about 5×10⁸ PFU/dose.

[0034] In some embodiments, the booster dose is administered in a dosage the same as the prime dose. In some embodiments, the booster dose is administered in a dosage lower than the prime dose.

[0035] In some embodiments, the subject suffers from or previously suffered from a hematological malignancy. In some embodiments, the hematological malignancy is selected from the group consisting of myeloid neoplasm, myelodysplastic syndromes (MDS), myeloproliferative/myelodysplastic syndromes, acute lymphoblastic leukemia (ALL), chronic lymphocytic leukemia (CLL), acute myeloid leukemia (AML), chronic myelogenous leukemia (CML), blast crisis chronic myelogenous leukemia (bcCML), B-cell acute lymphoid leukemia (B-ALL), T-cell acute lymphoid leukemia (T-ALL), T-cell lymphoma, and B-cell lymphoma.

[0036] In some embodiments, the subject has previously received one or more COVID-19 vaccines. In some embodiments, the previously received COVID-19 vaccine is an mRNA-, adenovirus-, or protein-based vaccine. In some embodiments, the previously received COVID-19 vaccine is Pfizer-BioNTech COVID-19 vaccine (BNT162b2), Moderna COVID-19 vaccine (mRNA-1273), Janssen COVID-19 vaccine (Ad26.COV2.S), Novavax COVID-19 vaccine adjuvanted, or Oxford-AstraZeneca ChAdOx1 nCoV-19 vaccine (AZD1222). In some embodiments, the previously received COVID vaccine comprises an S antigen or a coding sequence for an S antigen only. In some embodiments, the subject has received the previous vaccination at least 1 month, at least 2 months, at least 3 months, at least 4 months, at least 4 months, at least 5 months, at least 6 months, at least 7 months, at least 8 months, at least 9 months, at least 10 months, at least 11 months, or at least 12 months prior to administration of the composition.

### BRIEF DESCRIPTION OF THE DRAWINGS

[0037] FIG. 1 shows a study design schema.

[0038] FIGS. 2A-2B show treatment schemas. FIG. 2A: treatment schema with two doses of COH04S1 or Pfizer vaccine. FIG. 2B: amended treatment schema with four doses. This schema only applies to patients COH208, COH210, COH211, COH212, COH213. COH04S1, investigational COVID-19 vaccine; Pfizer, Comirnaty or similar SOC vaccine; AE, adverse events; EOT, end of treatment; PIA, primary immune assessment.

[0039] FIG. 3 shows a study design schema of COH04S1 booster in patients with poor COVID-19 immunity.

[0040] FIG. 4 shows a treatment schema. AE, adverse events; EOT, end of treatment; PIA, primary immune assessment. * represents the visits that may be tele-health visits with home phlebotomy.

[0041] FIG. 5 shows clinical trial enrollment status and patients' therapy group. Top table shows enrollment in the lead-in safety portion (6 patients/therapy type). Bottom table shows enrollment in the randomized portion. *=patients following the amended study scheme (FIG. 2B).

[0042] FIG. 6 shows spike (S), receptor binding domain (RBD), and nucleocapsid (N) binding antibody titers (binding antibody units (BAU)/ml) in COH04S1 vaccinated patients at different time points post-vaccination. d=day. *=value above threshold, needs re-testing.

[0043] FIG. 7 shows a statistical evaluation of spike (S), receptor binding domain (RBD), and nucleocapsid (N) binding antibody titers (binding antibody units (BAU)/ml) in COH04S1 vaccinated patients at different time points post-vaccination. Wilcoxon matched pairs signed rank test was used. P values<0.05 are indicated above the bars. Red and blue dotted lines indicate the IgG BAU/ml titers measured in BNT162b2-vaccinated healthcare workers (red, n=30), and COH04S1-vaccinated healthy volunteers (blue, N=30) at six months post-vaccination.

[0044] FIG. 8 shows neutralizing antibodies against SARS-CoV-2 ancestral strain (D614G), Beta, Delta, and Omicron BA.1 variants in serum of individual patients at baseline and at different timepoints post-vaccination. Day 56 D614G NT50 fold-increase compared to baseline is shown in each panel.

[0045] FIG. 9 shows a statistical evaluation of neutralizing antibodies against SARS-CoV-2 ancestral strain (D614G), Beta, Delta, and Omicron BA.1 variants in serum of COH04S1 vaccinated patients at baseline and at different timepoints post-vaccination. Black dotted line represents lower limit of detection. Red and blue dotted lines indicate the D614G-specific NT50 titers measured in BNT162b2-vaccinated healthcare workers (red, n=30), and COH04S1-vaccinated healthy volunteers (blue, N=30) at day 56 post-vaccination.

[0046] FIG. 10 shows spike (S)-, nucleocapsid (N)-, and membrane (M)-specific T cells evaluation using IFNγ ELISPOT on PBMC samples from individual COH04S1 vaccinated patients at different timepoints post-vaccination. Day 56 fold-increase in S- and N-IFNγ T cells compared to baseline is shown in each panel. Black dotted line represents the arbitrary threshold of positivity (50 spots/10⁶ cells).

[0047] FIG. 11 shows a statistical evaluation of Spike (S)-, Nucleocapsid (N)-, and Membrane (M)-specific T cells secreting IFNγ in PBMC samples of COH04S1-vaccinated patients at baseline and at different timepoints post-vaccination. Black dotted line represents the arbitrary threshold of positivity (50 spots/10⁶ cells). Red and blue dotted lines indicate the D614G-specific NT50 titers measured in BNT162b2-vaccinated healthcare workers (red, n=30), and COH04S1-vaccinated healthy volunteers (blue, N=30) at day 56 post-vaccination.

[0048] FIG. 12 shows a statistical evaluation of spike (S)-, nucleocapsid (N)-, and membrane (M)-specific T cells secreting IL-4 in PBMC samples of COH04S1-vaccinated patients at baseline and at different timepoints post-vaccination. Black dotted line represents the arbitrary threshold of positivity (50 spots/10⁶ cells).

[0049] FIG. 13 shows a statistical evaluation of spike (S)-, and nucleocapsid (N)-specific activation-induced marker (AIM)+ T cells in PBMC samples of COH04S1-vaccinated patients at baseline and at different timepoints post-vaccination.

[0050] FIGS. 14A-14C show sMVA construction. FIG. 14A is a schematic of an MVA genome. The MVA genome is about 178 kbp in length and contains about 9.6 kbp inverted terminal repeat (ITR) sequences. FIG. 14B shows the three sMVA fragments, F1, F2, and F3. The three subgenomic sMVA fragments (F1-F3) comprise about 60 kbp of the left, central, and right parts of the MVA genome as indicated. sMVA F1/F2 and F2/F3 share about 3 kbp overlapping homologous sequences for recombination (dotted crossed lines). Approximate genome positions of commonly used MVA insertion (Del2, IGR69/70, Del3) are indicated. FIG. 14C shows terminal concatemer resolution-hairpin loop-concatemer resolution (CR/HL/CR) sequences. Each of the sMVA fragments contains at both ends a sequence composition comprising a duplex copy of the MVA terminal HL flanked by CR sequences. BAC=bacterial artificial chromosome vector.

[0051] FIG. 15 shows the DNA sequence of an sMVA backbone with possible locations of insertion sites Del2, IGR69/70, and Del3, according to some embodiments.

[0052] FIG. 16 shows the DNA sequence of an F1 nucleotide fragment that includes a portion of the full MVA backbone sequence flanked by an MVA CR/HL/CR sequence with insertion sites, according to some embodiments.

[0053] FIG. 17 shows the DNA sequence of an F2 nucleotide fragment that includes a portion of the full MVA backbone sequence flanked by an MVA CR/HL/CR sequence with insertion sites, according to some embodiments.

[0054] FIG. 18 shows the DNA sequence of an F3 nucleotide fragment that includes a portion of the full MVA backbone sequence flanked by an MVA CR/HL/CR sequence with insertion sites, according to some embodiments.

### DETAILED DESCRIPTION

[0055] Disclosed herein are methods of vaccinating or protecting against a coronavirus infection, or preventing or treating COVID-19, in an immunocompromised subject (e.g., someone who has a weakened immune system). People can be immunocompromised either due to a medical condition or from receipt of immunosuppressive medications or treatments. In some embodiments, an immunocompromised subject may be a subject who has had or is having a hematological malignancy (blood cancer), and/or who has received or is receiving treatment (e.g., cellular therapy) for the hematological malignancy, including, for example, an autologous hematopoietic cell transplant, an allogeneic hematopoietic cell transplant, a chimeric antigen receptor (CAR)-T cell therapy, and/or a combination thereof.

[0056] According to some embodiments, the methods provide for an optimal timing after the cellular therapy to improve the chances that the subject's immune system response will result in preventing, treating, or reducing the severity of COVID-19 caused by a coronavirus infection, or preventing infection by the coronavirus, in the immunocompromised subject.

[0057] According to some embodiments, the methods disclosed herein use a recombinant synthetic MVA vector that is designed to express more than one SARS-CoV-2 proteins, mutant proteins, variant proteins, or immunogenic portions thereof. The rsMVA vector may improve the subject's immune system response in preventing, treating, or reducing the severity of COVID-19 caused by a coronavirus infection, or preventing infection by the coronavirus, in a blood cancer patient who has had a poor immune response to a different COVID-19 vaccination previously received or is likely to have a poor immune response to a different COVID-19 vaccination. According to some embodiments, the different COVID-19 vaccination is an mRNA vaccine and/or a vaccine that expresses or is capable of expressing only a single SARS-CoV-2 protein, mutant protein, variant protein, (or immunogenic portion thereof), e.g., the SARS-CoV-2 Spike protein (or a mutant, variant and/or immunogenic portion thereof).

[0058] The coronavirus infection that causes COVID-19 may be SARS-CoV-2 or any variants thereof according to the embodiments disclosed herein. In some embodiments, the coronavirus infection treated by the methods and compositions disclosed herein is caused by a variant of SARS-CoV-2. For example, a variant of SARS-CoV-2 may be a variant of concern including but not limited to B.1.1.7 (Alpha), B.1.351 (Beta), P.1 (Gamma), B.1.617.2 (Delta), B.1.621 (Mu), C.37 (Lambda), C.1.2, BA.1 (Omicron), BA.2 (Omicron), BA.2.12.1 (Omicron), BA.4 (Omicron), BA.5 (Omicron), BA.2.75 (Omicron), BQ.1 (Omicron), BQ.1.1 (Omicron), and XBB (Omicron).

[0059] The methods disclosed herein include a step of administering to the subject a composition that includes a recombinant synthetic MVA (rsMVA) vector or reconstituted virus that expresses or is capable of expressing one or more heterologous DNA sequences encoding a SARS-CoV-2 Spike (S) protein and a SARS-CoV-2 Nucleocapsid (N) protein; or variants or mutants of the S protein and N protein. In some embodiments, the composition is a vaccine composition or any immunogenic composition capable of providing full or partial protection against infection by a coronavirus that causes COVID-19. In other embodiments, the composition is a vaccine composition or any immunogenic composition capable of providing full or partial protection from developing moderate or severe COVID-19 symptoms. In other embodiments, the composition is a vaccine composition or any immunogenic composition capable of providing protection from hospitalization or death as a result of developing COVID-19.

[0060] In some embodiments, the blood cancer patient suffers from or previously suffered from a hematological malignancy such as a B-cell hematological malignancy (i.e., the subject is a “blood cancer patient”). Hematologic malignancies include cancers affecting blood cells and bone marrow including, but not limited to, leukemias (e.g., acute lymphocytic leukemia (ALL), chronic lymphocytic leukemia (CLL), acute myeloid leukemia (AML), chronic myeloid leukemia (CML)), myelomas, and lymphomas (e.g., Hodgkin's and non-Hodgkin's (NHL)). For example, in some embodiments, the subject suffered from a hematological malignancy within the last two years. In some embodiments, the subject suffers from or previously suffered from a B-cell lymphoid malignancy such as CLL, B-NHL, Hodgkin lymphoma, B-cell ALL, or multiple myeloma.

[0061] In some embodiments, the subject (i.e., blood cancer patient) is an immunocompromised blood cancer patient that has previously received one or more cellular therapies including an autologous hematopoietic cell transplant, an allogeneic hematopoietic cell transplant, and a chimeric antigen receptor (CAR) T cell therapy. In some embodiments, the subject (i.e., blood cancer patient) received the cellular therapy within 1 week to 6 months prior to administration of a composition disclosed herein. In some embodiments, the subject (i.e., blood cancer patient) received the cellular therapy within 6 to 12 months prior to administration of a composition disclosed herein. In some embodiments, the subject (i.e., blood cancer patient) received the cellular therapy greater than or equal to 12 months prior to administration of a composition disclosed herein. In some embodiments, the subject (i.e., blood cancer patient) received the cellular therapy at least 1 week, at least 2 weeks, at least 3 weeks, at least 4 weeks, at least 1 month, at least 2 months, at least 3 months, at least 4 months, at least 4 months, at least 5 months, at least 6 months, at least 7 months, at least 8 months, at least 9 months, at least 10 months, at least 11 months, or at least 12 months prior to administration of a composition disclosed herein. In some embodiments, the subject received the cellular therapy between 3 months and 6 months, between 6 months and 12 months, or more than 12 months prior to administration of a composition disclosed herein.

[0062] In some embodiments, the subject has previously received one or more COVID-19 vaccines such as an mRNA vaccine or a vaccine targeting the S antigen only but developed poor immune response to the previous vaccination. In some embodiments, the subject received the previous vaccination at least 1 month, at least 2 months, at least 3 months, at least 4 months, at least 4 months, at least 5 months, at least 6 months, at least 7 months, at least 8 months, at least 9 months, at least 10 months, at least 11 months, or at least 12 months prior to administration of an rsMVA composition disclosed herein.

[0063] The composition may be administered to the subject in any suitable manner. In some embodiments, the composition is administered to the subject parenterally, e.g., by intramuscular injection. In some embodiments, the composition is administered to the subject by intranasal instillation. In some embodiments, the composition is administered to the subject by intradermal injection. In some embodiments, the composition is administered to the subject by scarification.

[0064] The compositions disclosed herein may be given to a subject as a single, stand-alone dose. Thus, in some embodiments, the composition is administered to the subject as a single dose. In other embodiments, the compositions may be given as a multiple-dose regimen. For example, in some embodiments, the composition is administered to the subject as a prime dose followed by a booster dose. In some embodiments, the composition is administered to the subject as a prime dose, followed by a first booster dose and a second booster dose. In some embodiments, one or more additional doses are administered to the subject after administration of the prime and booster doses. In some embodiments, the composition is administered to the subject as a single dose as a booster dose to the previous vaccination. In some embodiments, one or more additional doses are administered to the subject as booster doses to the previous vaccination.

[0065] According to the embodiments disclosed herein, the compositions for preventing, treating, or reducing the severity of COVID-19 caused by SARS-CoV-2 (or variants thereof) disclosed herein may be interchangeable with other commercially available COVID-19 vaccine compositions, such that the prime dose is different than the booster dose or doses, or such that the booster dose or doses are different from each other or the prime dose. In other words, each dose may be a different vaccine composition. In some embodiments, the subject has previously received a different SARS-CoV-2 vaccine before administration of the vaccine compositions disclosed herein. For example, the previously received SARS-CoV-2 vaccine is an mRNA vaccine or a vaccine composition comprising the S antigen only. In other embodiments, the subject receives a different SARS-CoV-2 vaccine after a prime dose of the compositions is given. The compositions disclosed herein may be given as any one or more of the doses administered to a subject.

[0066] In a multiple-dose regimen the first (or only) booster dose may be administered such that the interval between the prime dose and the booster is about 2 weeks, about 3 weeks, about 4 weeks, or about 30 days. Alternatively, in some embodiments, the booster administration may be delayed, such that the interval between the prime dose and the booster is greater than 30 days, about 5 weeks, about 6 weeks, about 7 weeks, about 8 weeks, about 9 weeks, about 10 weeks, about 11 weeks, about 12 weeks, about 13 weeks, about 14 weeks, about 15 weeks, about 16 weeks, or longer than 16 weeks. In some embodiments, the interval between the prime dose and the booster is about 90 days or longer than 90 days. In certain embodiments, the interval between the prime dose and the booster is about 8 weeks.

[0067] In some embodiments, the multiple-dose regimen includes one or more additional booster doses (e.g., a second booster dose, a third booster dose, and so on). Said booster doses may be administered such that the interval between each booster dose is delayed as compared to the interval between the prime dose and the first booster. In certain embodiments, the interval between each booster dose is about 8 weeks, about 9 weeks, about 10 weeks, about 11 weeks, about 12 weeks, about 13 weeks, about 14 weeks, about 15 weeks, about 16 weeks, or longer than 16 weeks. In some embodiments, the interval between each booster dose is about 90 days or longer than 90 days. In some embodiments, the interval between each booster dose is about 90 days or longer than 90 days. In certain embodiments, the interval between each booster dose is between about 6 months to about 1 year. The interval between each booster may be on an annual or semi-annual schedule to account for additional variants that may arise each year.

[0068] In some embodiments, the prime dose is between 1.0×10⁷ PFU/dose and 5.0×10⁸ PFU/dose, for example, about 1.0×10⁷ PFU/dose, about 1.5×10⁷ PFU/dose, about 2.0×10⁷ PFU/dose, about 2.5×10⁷ PFU/dose, about 3.0×10⁷ PFU/dose, about 3.5×10⁷ PFU/dose, about 4.0×10⁷ PFU/dose, about 4.5×10⁷ PFU/dose, about 5.0×10⁷ PFU/dose, about 5.5×10⁷ PFU/dose, about 6.0×10⁷ PFU/dose, about 6.5×10⁷ PFU/dose, about 7.0×10⁷ PFU/dose, about 7.5×10⁷ PFU/dose, about 8.0×10⁷ PFU/dose, about 8.5×10⁷ PFU/dose, about 9.0×10⁷ PFU/dose, about 9.5×10⁷ PFU/dose, about 1.0×10⁸ PFU/dose, about 1.5×10⁸ PFU/dose, about 2.0×10⁸ PFU/dose, about 2.5×10⁸ PFU/dose, about 3.0×10⁸ PFU/dose, about 3.5×10⁸ PFU/dose, about 4.0×10⁸ PFU/dose, about 4.5×10⁸ PFU/dose, or about 5.0×10⁸ PFU/dose.

[0069] In some embodiments, the booster dose is in the same dosage as the prime dose. In some embodiments, the booster dose is a lower dosage than the prime dose. In some embodiments, the booster dose (e.g., the first booster dose or the second booster dose) is between 1.0×10⁷ PFU/dose and 5.0×10⁸ PFU/dose, for example, about 1.0×10⁷ PFU/dose, about 1.5×10⁷ PFU/dose, about 2.0×10⁷ PFU/dose, about 2.5×10⁷ PFU/dose, about 3.0×10⁷ PFU/dose, about 3.5×10⁷ PFU/dose, about 4.0×10⁷ PFU/dose, about 4.5×10⁷ PFU/dose, about 5.0×10⁷ PFU/dose, about 5.5×10⁷ PFU/dose, about 6.0×10⁷ PFU/dose, about 6.5×10⁷ PFU/dose, about 7.0×10⁷ PFU/dose, about 7.5×10⁷ PFU/dose, about 8.0×10⁷ PFU/dose, about 8.5×10⁷ PFU/dose, about 9.0×10⁷ PFU/dose, about 9.5×10⁷ PFU/dose, about 1.0×10⁸ PFU/dose, about 1.5×10⁸ PFU/dose, about 2.0×10⁸ PFU/dose, about 2.5×10⁸ PFU/dose, about 3.0×10⁸ PFU/dose, about 3.5×10⁸ PFU/dose, about 4.0×10⁸ PFU/dose, about 4.5×10⁸ PFU/dose, or about 5.0×10⁸ PFU/dose. The booster dose may be in a dosage the same as the prime dose or lower than the prime dose.

[0070] The rsMVA vectors used in accordance with the embodiments disclosed herein include a synthetic MVA genome that serves as a viral backbone (referred to herein as the sMVA backbone or sMVA genome backbone) and one or more heterologous nucleotide sequences that encode (i) a SARS-CoV-2 S protein (or variant, mutant, and/or immunogenic fragment thereof) and (ii) a SARS-CoV-2 N protein (or variant, mutant, and/or immunogenic fragment thereof).

[0071] In some embodiments, the sMVA backbone includes an internal unique region (UR) of a parental MVA genome flanked on each side by at least a portion of an inverted terminal repeat (ITR) region of the parental MVA genome (FIG. 14A). The parental genome used to generate the sMVA backbone may be any known MVA strain or variant thereof including, but not limited to, MVA strain Acambis (Accession #AY603355) or MVA strain Antoine (NCBI Accession #U94848). In some embodiments, the sMVA backbone is identical to the corresponding full-length parental MVA genome sequence. In other embodiments, the sMVA backbone is identical or substantially identical to the corresponding full-length parental MVA genome sequence, but includes one or more unintentional mutations originating from chemical synthesis, cloning, propagation, or other errors resulting from the production of the synthetically made virus. For example, in some embodiments, the sMVA backbone has a single T to A nucleotide alteration located in the IGR at three base pairs downstream of open reading frame (ORF) 021 L. In some embodiments, the sMVA backbone has at least 90% sequence identity, at least 91% sequence identity, at least 92% sequence identity, at least 93% sequence identity, at least 94% sequence identity, at least 95% sequence identity, at least 96% sequence identity, at least 97% sequence identity, at least 98% sequence identity, or at least 99% sequence identity to the corresponding full-length parental MVA genome sequence.

[0072] In some embodiments heterologous nucleotide sequences that encode one or more SARS-CoV-2 proteins (or variants, mutants, and/or immunogenic fragments thereof) are inserted into one or more MVA insertion sites. Non-limiting examples of insertion sites that may be used to insert the heterologous nucleotide sequences include, but are not limited to, Del2, IGR69-70, and Del3. FIG. 15 shows the sequence of an sMVA backbone (SEQ ID NO: 1) and the possible locations of insertion sites Del2 ([[<<DEL2INSERT]], where “<<” indicates the heterologous nucleotide insert at Del2 is the reverse complement of the SARS-CoV-2 protein sequence (or variants, mutants, and/or immunogenic fragments thereof) sequence), IGR69-70 ([[<<INSERTIGR69/70]A], [[<<INSERTIGR69/70]B], [[<<INSERTIGR69/70]c], or [[<<INSERTIGR69/70]D], where “<<” indicates the heterologous nucleotide insert at Del2 is the reverse complement of the SARS-CoV-2 protein sequence (or variants, mutants, and/or immunogenic fragments thereof), and each insertion site is representative of four alternative insertion sites for IGR69/70: A, B, C, or D), and Del3 ([[DEL3INSERT>>]], where “>>” indicates the heterologous nucleotide insert at Del3 is the forward SARS-CoV-2 protein sequence (or variant, mutant, and/or immunogenic fragment thereof) according to some embodiments. FIG. 15 also includes an “X” (in bold underline) that may be a T or an A according to some embodiments.

[0073] According to some embodiments, the rsMVA viral vector that is used in the compositions disclosed herein is generated according to the methods disclosed in International Application Publication No. WO 2021/236550, which is hereby incorporated by reference as if fully disclosed herein and as indicated in the working examples below. In certain embodiments, three nucleotide fragments, F1, F2, and F3 are synthesized, each fragment including a portion of the full MVA backbone sequence flanked by an MVA concatemer resolution-hairpin loop-concatemer resolution (CR/HL/CR) sequence (FIGS. 14B-14C). F1 encompasses the left ITR and ˜50 kbp of the left end of the internal UR of the MVA genome; F2 contains ˜60 kbp of the middle part of the internal UR of the MVA genome; and F3 encompasses ˜50 kbp of the right end of the internal UR and the right ITR of the MVA genome. sMVA F1 and F2 as well as sMVA F2 and F3 are designed to share ˜3 kbp overlapping sequences to allow the reconstitution of the complete MVA genome by homologous recombination (FIG. 14B). A duplex copy of the 165-nucleotide-long MVA terminal hairpin loop (HL) flanked by MVA CR sequences is added to both ends of each of the three fragments to promote MVA genome resolution and packaging (FIG. 14C). The three sMVA fragments are cloned and maintained in E. coli (DH10B, EP1300, GS1783) by a yeast-bacterial shuttle vector, termed pCCI-Brick (GeneScript), which contains a bacterial mini-F replicon element that can be used as a bacterial artificial chromosome (BAC) vector to stably propagate the three fragments at a low copy number in bacteria. Next-generation sequencing analysis confirmed the integrity of the MVA genomic sequences of the fragments, with the notable exception of an unknown single-point mutation within sMVA fragment F1 located in a non-coding determining region at 3 bp downstream of 021L. FIGS. 16-18 (SEQ ID NOs: 2-4) show sequences of F1, F2, F3, respectively, according to some embodiments. The CR/HL/CR sequences are underlined. The Del2, IGR69/70, and Del3 insertion sites are also indicated in FIGS. 16-18. As such, in some embodiments, each fragment may serve to carry a separate SARS-CoV-2 protein sequence (or variant, mutant, and/or immunogenic fragment thereof). F1, F2, and F3 are then cotransfected into host cells with a helper virus (e.g., fowl pox virus) wherein the full rsMVA virus is reconstituted and capable of expressing the SARS-CoV-2 protein sequence (or variant, mutant, and/or immunogenic fragment thereof) or sequences inserted therein. Each fragment, F1, F2, and F3, includes an overlapping sequence with the adjacent sequence such that when reconstituted, the MVA genome is sequentially reconstituted in the order F1□F2□F3 via homologous recombination between fragments according to some embodiments.

[0074] In some embodiments, a nucleotide sequence that encodes a SARS-CoV-2 S protein (or variant, mutant, and/or immunogenic fragment thereof) is inserted into the Del2 site within F1, the IGR69/70 site within F2, or the Del3 site within F3.

[0075] In some embodiments, a nucleotide sequence that encodes a SARS-CoV-2 N protein (or variant, mutant, and/or immunogenic fragment thereof) is inserted into the Del2 site within F1 and a nucleotide sequence that encodes a SARS-CoV-2 S protein (or variant, mutant, and/or immunogenic fragment thereof) is inserted into the Del3 site within F3.

[0076] In some embodiments, a nucleotide sequence that encodes a SARS-CoV-2 S protein (or variant, mutant, and/or immunogenic fragment thereof) is inserted into the Del2 site within F1 and a nucleotide sequence that encodes a SARS-CoV-2 N protein (or variant, mutant, and/or immunogenic fragment thereof) is inserted into the Del3 site within F3.

[0077] In some embodiments, a nucleotide sequence that encodes a SARS-CoV-2 S protein (or variant, mutant, and/or immunogenic fragment thereof) is inserted into the IGR69/70 site within F2 and a nucleotide sequence that encodes a SARS-CoV-2 N protein (or variant, mutant, and/or immunogenic fragment thereof) is inserted into the Del3 site within F3.

[0078] In some embodiments, a nucleotide sequence that encodes a SARS-CoV-2 N protein (or variant, mutant, and/or immunogenic fragment thereof) is inserted into the IGR69/70 site within F2 and a nucleotide sequence that encodes a SARS-CoV-2 S protein (or variant, mutant, and/or immunogenic fragment thereof) is inserted into the Del3 site within F3.

[0079] In some embodiments, a nucleotide sequence that encodes a SARS-CoV-2 S protein (or variant, mutant, and/or immunogenic fragment thereof) is inserted into the Del2 site within F1 and a nucleotide sequence that encodes a SARS-CoV-2 N protein (or variant, mutant, and/or immunogenic fragment thereof) is inserted into the IGR69/70 site within F2.

[0080] In some embodiments, a nucleotide sequence that encodes a SARS-CoV-2 N protein (or variant, mutant, and/or immunogenic fragment thereof) is inserted into the Del2 site within F1 and a nucleotide sequence that encodes a SARS-CoV-2 S protein (or variant, mutant, and/or immunogenic fragment thereof) is inserted into the IGR69/70 site within F2.

[0081] The SARS-CoV-2 S protein (or variant, mutant, and/or immunogenic fragment thereof) and/or the SARS-CoV-2 N protein (or variant, mutant, and/or immunogenic fragment thereof) that are inserted into the F1, F2, and/or F3 fragments as discussed herein are encoded by any SARS-CoV2 S or N protein, including a reference sequence or any variant or mutants thereof. Exemplary SARS-CoV2 S or N proteins that are encoded by the heterologous sequences that can be inserted into the F1, F2, and/or F3 fragments as discussed herein (and thus incorporated into the rsMVA vector and reconstituted rsMVA virus) are found in International Application Publication No. WO 2021/236550, as well as additional sequences and mutations discussed below.

[0082] In some embodiments, the rsMVA vector comprises one or more heterologous DNA sequences encoding the S protein and/or N protein of the SARS-CoV-2 Wuhan-Hu-1 reference stain. In some embodiments, the rsMVA vector comprises one or more heterologous DNA sequences encoding a mutant S protein and/or N protein such as mutant S protein and/or N protein based on a variant of concern, including B.1.1.7 (Alpha), B.1.351 (Beta), P.1 (Gamma), B.1.617.2 (Delta), B.1.621 (Mu), C.37 (Lambda), C.1.2, BA.1 (Omicron), BA.2 (Omicron), BA.2.12.1 (Omicron), BA.4 (Omicron), BA.5 (Omicron), BA.2.75 (Omicron), BQ.1 (Omicron), BQ.1.1 (Omicron), and XBB (Omicron). Exemplary sequences of the variants of the S proteins and N proteins are illustrated in Table 1 below. According to some embodiments, the rsMVA vectors are reconstituted rsMVA viruses that express or are capable of expressing the one or more S proteins and/or N proteins (or mutants thereof) disclosed herein.

TABLE 1
Exemplary Sequences of SARS-COV-2 S and N Proteins

| SEQ ID | | |
|---|---|---|
| NO: | Sequences | Descriptions |
| 5 | atgtttgtctttcttgtcttattgccactagtctctagtcagtgtgttaatcttaca | Nucleotide |
| | accagaactcaattaccacctgcatacactaattctttcacacgtggtgttt | sequence/ORF (5′ to |
| | attaccctgacaaagtattcagatcctcagtattacattcaactcaggactt | 3′ end) of the SARS- |
| | gttcttacctttcttctccaatgttacttggttccatgctatacatgtctctggga | CoV-2 S antigen |
| | ccaatggtactaagaggtttgataaccctgtcctaccatttaatgatggtgt | sequence based on |
| | ttatttcgcttccactgagaagtctaacataataagaggctggatatttggt | the Wuhan-Hu-1 |
| | actactttagattcgaagacccagtccctacttattgttaataacgctacta | reference strain |
| | atgttgttattaaagtctgtgaatttcaattctgtaatgatccattcttgggtgttt | (#NC_045512) and |
| | attaccacaagaacaacaagagttggatggaaagtgagttcagagttt | optimized for stability |
| | attctagtgcgaataattgcactttcgaatatgtctctcagcctttccttatgg | in vaccinia by silent |
| | accttgaaggtaaacagggtaatttcaagaatcttagggaatttgtgttta | codon alteration to |
| | agaatattgatggttatttcaagatatattctaagcacacgcctattaattta | avoid 4 or more of the |
| | gtgcgtgatctccctcagggtttctcggctttagaaccattggtagatttgcc | same nucleotides in |
| | aataggtattaacatcactaggtttcaaactttacttgctttacatagaagtt | consecutive order |
| | atttgactcctggtgattcttcttcaggttggacagctggtgctgcagcttatt | |
| | atgtgggttatcttcaacctaggactttcctattgaaatataatgagaatgg | |
| | aaccattacagatgctgtagactgtgcacttgaccctctctcagaaacaa | |
| | agtgtacgttgaaatccttcactgtagagaaaggaatctatcaaacttcta | |
| | actttagagtccaaccaacagaatctattgttagatttcctaatattacaaa | |
| | cttgtgccctttcggtgaagtatttaacgccaccagatttgcatctgtttatgc | |
| | ttggaacaggaagagaatcagcaactgtgttgctgattattctgtcctatat | |
| | aattccgcatcattctccacatttaagtgttatggagtgtctcctactaaatta | |
| | aatgatctctgctttactaatgtctatgcagattcatttgtaattagaggtgat | |
| | gaagtcagacaaatcgctccagggcaaactggaaagattgctgattat | |
| | aattataaattaccagatgactttacaggctgcgttatagcttggaattcta | |
| | acaatcttgattctaaggttggtggtaattataattacctgtatagattgttta | |
| | ggaagtctaatctcaaacctttcgagagagatatttcaactgaaatctatc | |
| | aggccggtagcacaccttgtaatggtgttgaaggatttaattgttactttcct | |
| | ttacaatcatatggtttccaacccactaatggtgttggttaccaaccataca | |
| | gagtagtagtactttcatttgaacttctacatgcaccagcaactgtttgtgg | |
| | acctaagaagtctactaatttggttaagaacaaatgtgtcaatttcaacttc | |
| | aatggtttaacaggcacaggtgttcttactgagtctaacaagaagtttctg | |
| | cctttccaacaatttggcagagacattgctgacactactgatgctgtccgt | |
| | gatccacagacacttgagattcttgacattacaccatgttcatttggtggtgt | |
| | cagtgttataacaccaggaacaaatacttctaaccaggttgctgttctttat | |
| | caggatgttaactgcacagaagtccctgttgctattcatgcagatcaactt | |
| | actcctacttggcgtgtttattctacaggttctaatgtatttcaaacacgtgca | |
| | ggctgtttaataggagctgaacatgtcaacaactcatatgagtgtgacat | |
| | acccattggtgcaggtatatgcgctagttatcagactcagactaattctcct | |
| | cggcgggcacgtagtgtagctagtcaatccatcattgcctacactatgtc | |
| | acttggtgcagagaattcagttgcttactctaataactctattgccataccc | |
| | acaaactttactattagtgttaccacagaaattctaccagtgtctatgacca | |
| | agacatcagtagattgtacaatgtacatttgtggtgattcaactgaatgca | |
| | gcaatctattgttgcaatatggcagtttctgtacacaattaaaccgtgcttta | |
| | actggaatagctgttgaacaagacaagaacacccaagaagtatttgca | |
| | caagtcaaacaaatttacaagacaccaccaattaaagatttcggtggat | |
| | ttaatttctcacaaatattaccagatccatctaaaccaagcaagaggtcat | |
| | ttattgaagatctactattcaacaaagtgacacttgcagatgctggcttcat | |
| | caaacaatatggtgattgccttggtgatattgctgctagagacctcatttgt | |
| | gcacagaagtttaacggccttactgtattgccacctttgctcacagatgaa | |
| | atgattgctcaatacacttctgcactgttagcgggtacaatcacttctggttg | |
| | gacctttggtgcaggtgctgcattacaaataccatttgctatgcaaatggct | |
| | tataggtttaatggtattggagttacacagaatgttctctatgagaaccag | |
| | aaattgattgccaaccaatttaatagtgctattggcaagattcaagactca | |
| | ctttcttccacagcaagtgcacttggtaaacttcaagatgtggtcaaccag | |
| | aatgcacaagctttaaacacgcttgttaaacaacttagctccaactttggt | |
| | gcaatttcaagtgtattaaatgatatcctttcacgtcttgacaaagttgagg | |
| | ctgaagtgcaaattgataggttgatcacaggcagacttcaaagtttgcag | |
| | acatatgtgactcaacaattaattagagctgcagaaatcagagcttctgc | |
| | taatcttgctgctactaagatgtcagagtgtgtacttggacaatctaagag | |
| | agttgatttctgtggaaagggctatcatcttatgtccttccctcagtcagcac | |
| | ctcatggtgtagtcttcttgcatgtgacttatgtccctgcacaagagaagaa | |
| | cttcacaactgctcctgccatttgtcatgatggtaaagcacactttcctcgtg | |
| | aaggtgtctttgtttcaaatggcacacactggtttgtaacacaaaggaattt | |
| | ctatgaaccacaaatcattactacagacaacacatttgtgtctggtaactg | |
| | tgatgttgtaataggaattgtcaacaacacagtttatgatcctttgcaacct | |
| | gaattagactcattcaaggaggagttagataaatatttcaagaatcatac | |
| | atcaccagatgttgatttaggtgacatctctggcattaatgcttcagttgtaa | |
| | acattcagaaagaaattgaccgcctcaatgaggttgccaagaatttaaa | |
| | tgaatctctcatcgatctccaagaacttggaaagtatgagcagtatatca | |
| | aatggccatggtacatttggctaggtttcatagctggcttgattgccatagt | |
| | aatggtgacaattatgctttgctgtatgaccagttgctgtagttgtctcaagg | |
| | gctgttgttcttgtggatcctgctgcaaatttgatgaagacgactctgagcc | |
| | agtgctcaaaggagtcaaattacattacacataa | |
| 6 | MFVFLVLLPLVSSQCVNLTTRTQLPPAYTNSFTRGV | Amino acid sequence |
| | YYPDKVFRSSVLHSTQDLFLPFFSNVTWFHAIHVSG | (N- to C-terminus) of |
| | TNGTKRFDNPVLPFNDGVYFASTEKSNIIRGWIFGT | the SARS-COV-2 S |
| | TLDSKTQSLLIVNNATNVVIKVCEFQFCNDPFLGVY | antigen sequence |
| | YHKNNKSWMESEFRVYSSANNCTFEYVSQPFLMD | based on the Wuhan- |
| | LEGKQGNFKNLREFVFKNIDGYFKIYSKHTPINLVRD | Hu-1 reference strain |
| | LPQGFSALEPLVDLPIGINITRFQTLLALHRSYLTPG | (#NC_045512) |
| | DSSSGWTAGAAAYYVGYLQPRTFLLKYNENGTITD | |
| | AVDCALDPLSETKCTLKSFTVEKGIYQTSNFRVQPT | |
| | ESIVRFPNITNLCPFGEVFNATRFASVYAWNRKRIS | |
| | NCVADYSVLYNSASFSTFKCYGVSPTKLNDLCFTN | |
| | VYADSFVIRGDEVRQIAPGQTGKIADYNYKLPDDFT | |
| | GCVIAWNSNNLDSKVGGNYNYLYRLFRKSNLKPFE | |
| | RDISTEIYQAGSTPCNGVEGFNCYFPLQSYGFQPT | |
| | NGVGYQPYRVVVLSFELLHAPATVCGPKKSTNLVK | |
| | NKCVNFNFNGLTGTGVLTESNKKFLPFQQFGRDIA | |
| | DTTDAVRDPQTLEILDITPCSFGGVSVITPGTNTSNQ | |
| | VAVLYQDVNCTEVPVAIHADQLTPTWRVYSTGSNV | |
| | FQTRAGCLIGAEHVNNSYECDIPIGAGICASYQTQT | |
| | NSPRRARSVASQSIIAYTMSLGAENSVAYSNNSIAIP | |
| | TNFTISVTTEILPVSMTKTSVDCTMYICGDSTECSNL | |
| | LLQYGSFCTQLNRALTGIAVEQDKNTQEVFAQVKQI | |
| | YKTPPIKDFGGFNFSQILPDPSKPSKRSFIEDLLFNK | |
| | VTLADAGFIKQYGDCLGDIAARDLICAQKFNGLTVLP | |
| | PLLTDEMIAQYTSALLAGTITSGWTFGAGAALQIPFA | |
| | MQMAYRFNGIGVTQNVLYENQKLIANQFNSAIGKIQ | |
| | DSLSSTASALGKLQDVVNQNAQALNTLVKQLSSNF | |
| | GAISSVLNDILSRLDKVEAEVQIDRLITGRLQSLQTY | |
| | VTQQLIRAAEIRASANLAATKMSECVLGQSKRVDFC | |
| | GKGYHLMSFPQSAPHGVVFLHVTYVPAQEKNFTTA | |
| | PAICHDGKAHFPREGVFVSNGTHWFVTQRNFYEP | |
| | QIITTDNTFVSGNCDVVIGIVNNTVYDPLQPELDSFK | |
| | EELDKYFKNHTSPDVDLGDISGINASVVNIQKEIDRL | |
| | NEVAKNLNESLIDLQELGKYEQYIKWPWYIWLGFIA | |
| | GLIAIVMVTIMLCCMTSCCSCLKGCCSCGSCCKFDE | |
| | DDSEPVLKGVKLHYT | |
| 7 | atgtctgataacggaccacagaatcagcgaaacgcaccacgcattac | Nucleotide sequence/ |
| | gtttggtggaccctcagattcaactggcagtaaccagaatggagaacg | ORF (5′ to 3′ end) of |
| | cagtggagcgcgatctaaacaacgtcggcctcaaggtttacccaataat | the SARS-CoV-2 N |
| | actgcgtcttggttcaccgctctcactcaacatggcaaggaagaccttaa | antigen sequence |
| | attccctcgaggacaaggcgttccaattaacaccaatagcagtccagat | based on the Wuhan- |
| | gaccaaattggctactaccgaagagctaccagacgaattcgtggtggt | Hu-1 reference strain |
| | gacggtaagatgaaagatctcagtccaagatggtatttctactacctagg | (#NC_045512) and |
| | aactgggccagaagctggacttccctatggtgctaacaaagacggcat | optimized for stability |
| | catatgggttgcaactgagggagccttgaatacacctaaagatcacatt | in vaccinia by silent |
| | ggcacccgcaatcctgctaacaatgctgcaatcgtgctacaacttcctca | codon alteration to |
| | aggaacaacattgcctaaaggcttctacgcagaagggagcagaggc | avoid 4 or more of the |
| | ggcagtcaagcctcttctcgttcctcatcacgtagtcgcaacagttcaaga | same nucleotides in |
| | aattcaactccaggcagcagtagaggaacttctcctgctagaatggctg | consecutive order |
| | gcaatggcggtgatgctgctcttgctttgctgctgcttgacagattgaacca | |
| | gcttgagagcaagatgtctggtaaaggccaacaacaacaaggccaa | |
| | actgtcactaagaaatctgctgctgaggcttctaagaagcctcggcaga | |
| | aacgtactgccactaaagcatacaatgtaacacaagctttcggcagac | |
| | gtggtccagaacaaacccaaggaaactttggagaccaggaactaatc | |
| | agacaaggaactgattacaaacattggccgcaaattgcacaatttgctc | |
| | ccagcgcttcagcgttcttcggaatgtcgcgcattggcatggaagtcaca | |
| | ccttcgggaacgtggttgacctacacaggtgccatcaaattggatgaca | |
| | aagatccaaatttcaaagatcaagtcatattgctgaataagcatattgac | |
| | gcatacaagacattcccaccaacagagcctaagaaggacaagaaga | |
| | agaaggctgatgaaactcaagccttaccgcagagacagaagaaaca | |
| | gcaaactgtgactcttcttcctgctgcagatttggatgatttctccaaacaat | |
| | tgcaacaatccatgagcagtgctgactcaactcaggcctaa | |
| 8 | MSDNGPQNQRNAPRITFGGPSDSTGSNQNGERSG | Amino acid sequence |
| | ARSKQRRPQGLPNNTASWFTALTQHGKEDLKFPR | (N- to C-terminus) of |
| | GQGVPINTNSSPDDQIGYYRRATRRIRGGDGKMKD | the SARS-CoV-2 N |
| | LSPRWYFYYLGTGPEAGLPYGANKDGIIWVATEGA | antigen sequence |
| | LNTPKDHIGTRNPANNAAIVLQLPQGTTLPKGFYAE | based on the Wuhan- |
| | GSRGGSQASSRSSSRSRNSSRNSTPGSSRGTSPA | Hu-1 reference strain |
| | RMAGNGGDAALALLLLDRLNQLESKMSGKGQQQQ | (#NC_045512) |
| | GQTVTKKSAAEASKKPRQKRTATKAYNVTQAFGRR | |
| | GPEQTQGNFGDQELIRQGTDYKHWPQIAQFAPSA | |
| | SAFFGMSRIGMEVTPSGTWLTYTGAIKLDDKDPNF | |
| | KDQVILLNKHIDAYKTFPPTEPKKDKKKKADETQAL | |
| | PQRQKKQQTVTLLPAADLDDFSKQLQQSMSSADS | |
| | TQA | |
| 9 | atgtttgtctttcttgtcttattgccactagtctctagtcagtgtgttaatcttaga | Nucleotide |
| | accagaactcaattaccacctgcatacactaattctttcacacgtggtgttt | sequence/ORF (5′ to |
| | attaccctgacaaagtattcagatcctcagtattacattcaactcaggactt | 3′ end) of a codon- |
| | gttcttacctttcttctccaatgttacttggttccatgctatacatgtctctggga | optimized SARS-CoV- |
| | ccaatggtactaagaggtttgataaccctgtcctaccatttaatgatggtgt | 2 S antigen sequence |
| | ttatttcgcttccactgagaagtctaacataataagaggctggatatttggt | based on the Wuhan- |
| | actactttagattcgaagacccagtccctacttattgttaataacgctacta | Hu-1 reference strain |
| | atgttgttattaaagtctgtgaatttcaattctgtaatgatccattcttggatgttt | (#NC_045512) and |
| | attaccacaagaacaacaagagttggatggaaagtggagtttattctag | optimized for vaccinia, |
| | tgcgaataattgcactttcgaatatgtctctcagcctttccttatggaccttga | which is further |
| | aggtaaacagggtaatttcaagaatcttagggaatttgtgtttaagaatatt | modified to encode for |
| | gatggttatttcaagatatattctaagcacacgcctattaatttagtgcgtga | an S antigen that |
| | tctccctcagggtttctcggctttagaaccattggtagatttgccaataggta | includes mutations of |
| | ttaacatcactaggtttcaaactttacttgctttacatagaagttatttgactcc | the B.1.617.2 variant |
| | tggtgattcttcttcaggttggacagctggtgctgcagcttattatgtgggtta | lineage identified in |
| | tcttcaacctaggactttcctattgaaatataatgagaatggaaccattac | India, including T19R, |
| | agatgctgtagactgtgcacttgaccctctctcagaaacaaagtgtacgtt | G142D, Del156/157, |
| | gaaatccttcactgtagagaaaggaatctatcaaacttctaactttagagt | R158G, L452R, |
| | ccaaccaacagaatctattgttagatttcctaatattacaaacttgtgccctt | T478K, D614G, |
| | tcggtgaagtatttaacgccaccagatttgcatctgtttatgcttggaacag | P681R, and D950N |
| | gaagagaatcagcaactgtgttgctgattattctgtcctatataattccgca | |
| | tcattctccacatttaagtgttatggagtgtctcctactaaattaaatgatctct | |
| | gctttactaatgtctatgcagattcatttgtaattagaggtgatgaagtcag | |
| | acaaatcgctccagggcaaactggaaagattgctgattataattataaat | |
| | taccagatgactttacaggctgcgttatagcttggaattctaacaatcttga | |
| | ttctaaggttggtggtaattataattaccggtatagattgtttaggaagtcta | |
| | atctcaaacctttcgagagagatatttcaactgaaatctatcaggccggta | |
| | gcaaaccttgtaatggtgttgaaggatttaattgttactttcctttacaatcat | |
| | atggtttccaacccactaatggtgttggttaccaaccatacagagtagtag | |
| | tactttcatttgaacttctacatgcaccagcaactgtttgtggacctaagaa | |
| | gtctactaatttggttaagaacaaatgtgtcaatttcaacttcaatggtttaa | |
| | caggcacaggtgttcttactgagtctaacaagaagtttctgcctttccaac | |
| | aatttggcagagacattgctgacactactgatgctgtccgtgatccacag | |
| | acacttgagattcttgacattacaccatgttcatttggtggtgtcagtgttata | |
| | acaccaggaacaaatacttctaaccaggttgctgttctttatcagggtgtta | |
| | actgcacagaagtccctgttgctattcatgcagatcaacttactcctacttg | |
| | gcgtgtttattctacaggttctaatgtatttcaaacacgtgcaggctgtttaat | |
| | aggagctgaacatgtcaacaactcatatgagtgtgacatacccattggt | |
| | gcaggtatatgcgctagttatcagactcagactaattctcgtcggcgggc | |
| | acgtagtgtagctagtcaatccatcattgcctacactatgtcacttggtgca | |
| | gagaattcagttgcttactctaataactctattgccatacccacaaacttta | |
| | ctattagtgttaccacagaaattctaccagtgtctatgaccaagacatcag | |
| | tagattgtacaatgtacatttgtggtgattcaactgaatgcagcaatctattg | |
| | ttgcaatatggcagtttctgtacacaattaaaccgtgctttaactggaatag | |
| | ctgttgaacaagacaagaacacccaagaagtatttgcacaagtcaaa | |
| | caaatttacaagacaccaccaattaaagatttcggtggatttaatttctcac | |
| | aaatattaccagatccatctaaaccaagcaagaggtcatttattgaagat | |
| | ctactattcaacaaagtgacacttgcagatgctggcttcatcaaacaatat | |
| | ggtgattgccttggtgatattgctgctagagacctcatttgtgcacagaagt | |
| | ttaacggccttactgtattgccacctttgctcacagatgaaatgattgctca | |
| | atacacttctgcactgttagcgggtacaatcacttctggttggacctttggtg | |
| | caggtgctgcattacaaataccatttgctatgcaaatggcttataggtttaa | |
| | tggtattggagttacacagaatgttctctatgagaaccagaaattgattgc | |
| | caaccaatttaatagtgctattggcaagattcaagactcactttcttccaca | |
| | gcaagtgcacttggtaaacttcagaatgtggtcaaccagaatgcacaa | |
| | gctttaaacacgcttgttaaacaacttagctccaactttggtgcaatttcaa | |
| | gtgtattaaatgatatcctttcacgtcttgacaaagttgaggctgaagtgca | |
| | aattgataggttgatcacaggcagacttcaaagtttgcagacatatgtga | |
| | ctcaacaattaattagagctgcagaaatcagagcttctgctaatcttgctg | |
| | ctactaagatgtcagagtgtgtacttggacaatctaagagagttgatttctg | |
| | tggaaagggctatcatcttatgtccttccctcagtcagcacctcatggtgta | |
| | gtcttcttgcatgtgacttatgtccctgcacaagagaagaacttcacaact | |
| | gctcctgccatttgtcatgatggtaaagcacactttcctcgtgaaggtgtctt | |
| | tgtttcaaatggcacacactggtttgtaacacaaaggaatttctatgaacc | |
| | acaaatcattactacagacaacacatttgtgtctggtaactgtgatgttgta | |
| | ataggaattgtcaacaacacagtttatgatcctttgcaacctgaattagac | |
| | tcattcaaggaggagttagataaatatttcaagaatcatacatcaccaga | |
| | tgttgatttaggtgacatctctggcattaatgcttcagttgtaaacattcaga | |
| | aagaaattgaccgcctcaatgaggttgccaagaatttaaatgaatctctc | |
| | atcgatctccaagaacttggaaagtatgagcagtatatcaaatggccat | |
| | ggtacatttggctaggtttcatagctggcttgattgccatagtaatggtgac | |
| | aattatgctttgctgtatgaccagttgctgtagttgtctcaagggctgttgttct | |
| | tgtggatcctgctgcaaatttgatgaagacgactctgagccagtgctcaa | |
| | aggagtcaaattacattacacataa | |
| 10 | MFVFLVLLPLVSSQCVNLRTRTQLPPAYTNSFTRGV | Amino acid sequence |
| | YYPDKVFRSSVLHSTQDLFLPFFSNVTWFHAIHVSG | (N- to C-terminus) of |
| | TNGTKRFDNPVLPFNDGVYFASTEKSNIIRGWIFGT | a codon-optimized |
| | TLDSKTQSLLIVNNATNVVIKVCEFQFCNDPFLDVYY | SARS-CoV-2 S |
| | HKNNKSWMESGVYSSANNCTFEYVSQPFLMDLEG | antigen sequence |
| | KQGNFKNLREFVFKNIDGYFKIYSKHTPINLVRDLPQ | based on the Wuhan- |
| | GFSALEPLVDLPIGINITRFQTLLALHRSYLTPGDSS | Hu-1 reference strain |
| | SGWTAGAAAYYVGYLQPRTFLLKYNENGTITDAVD | (#NC_045512) and |
| | CALDPLSETKCTLKSFTVEKGIYQTSNFRVQPTESIV | optimized for vaccinia, |
| | RFPNITNLCPFGEVFNATRFASVYAWNRKRISNCVA | which is further |
| | DYSVLYNSASFSTFKCYGVSPTKLNDLCFTNVYAD | modified to encode for |
| | SFVIRGDEVRQIAPGQTGKIADYNYKLPDDFTGCVI | an S antigen that |
| | AWNSNNLDSKVGGNYNYRYRLFRKSNLKPFERDIS | includes mutations of |
| | TEIYQAGSKPCNGVEGFNCYFPLQSYGFQPTNGVG | the B.1.617.2 variant |
| | YQPYRVVVLSFELLHAPATVCGPKKSTNLVKNKCV | lineage identified in |
| | NFNFNGLTGTGVLTESNKKFLPFQQFGRDIADTTDA | India, including T19R, |
| | VRDPQTLEILDITPCSFGGVSVITPGTNTSNQVAVLY | G142D, Del156/157, |
| | QGVNCTEVPVAIHADQLTPTWRVYSTGSNVFQTRA | R158G, L452R, |
| | GCLIGAEHVNNSYECDIPIGAGICASYQTQTNSRRR | T478K, D614G, |
| | ARSVASQSIIAYTMSLGAENSVAYSNNSIAIPTNFTIS | P681R, and D950N |
| | VTTEILPVSMTKTSVDCTMYICGDSTECSNLLLQYG | |
| | SFCTQLNRALTGIAVEQDKNTQEVFAQVKQIYKTPP | |
| | IKDFGGFNFSQILPDPSKPSKRSFIEDLLFNKVTLAD | |
| | AGFIKQYGDCLGDIAARDLICAQKFNGLTVLPPLLTD | |
| | EMIAQYTSALLAGTITSGWTFGAGAALQIPFAMQMA | |
| | YRFNGIGVTQNVLYENQKLIANQFNSAIGKIQDSLSS | |
| | TASALGKLQNVVNQNAQALNTLVKQLSSNFGAISSV | |
| | LNDILSRLDKVEAEVQIDRLITGRLQSLQTYVTQQLI | |
| | RAAEIRASANLAATKMSECVLGQSKRVDFCGKGYH | |
| | LMSFPQSAPHGVVFLHVTYVPAQEKNFTTAPAICH | |
| | DGKAHFPREGVFVSNGTHWFVTQRNFYEPQIITTD | |
| | NTFVSGNCDVVIGIVNNTVYDPLQPELDSFKEELDK | |
| | YFKNHTSPDVDLGDISGINASVVNIQKEIDRLNEVAK | |
| | NLNESLIDLQELGKYEQYIKWPWYIWLGFIAGLIAIV | |
| | MVTIMLCCMTSCCSCLKGCCSCGSCCKFDEDDSE | |
| | PVLKGVKLHYT | |
| 11 | atgtttgtctttcttgtcttattgccactagtctctagtcagtgtgttaatcttaga | Nucleotide |
| | accagaactcaattaccacctgcatacactaattctttcacacgtggtgttt | sequence/ORF (5′ to |
| | attaccctgacaaagtattcagatcctcagtattacattcaactcaggactt | 3′ end) of a codon- |
| | gttcttacctttcttctccaatgttacttggttccatgctatacatgtctctggga | optimized SARS-CoV- |
| | ccaatggtactaagaggtttgataaccctgtcctaccatttaatgatggtgt | 2 S antigen sequence |
| | ttatttcgcttccactgagaagtctaacataataagaggctggatatttggt | based on the Wuhan- |
| | actactttagattcgaagacccagtccctacttattgttaataacgctacta | Hu-1 reference strain |
| | atgttgttattaaagtctgtgaatttcaattctgtaatgatccattcttgggtgttt | (#NC_045512) and |
| | attaccacaagaacaacaagagttggatggaaagtggtgtttattctagt | optimized for vaccinia, |
| | gcgaataattgcactttcgaatatgtctctcagcctttccttatggaccttga | which is further |
| | aggtaaacagggtaatttcaagaatcttagggaatttgtgtttaagaatatt | modified to encode for |
| | gatggttatttcaagatatattctaagcacacgcctattaatttagtgcgtga | an S antigen that |
| | tctccctcagggtttctcggctttagaaccattggtagatttgccaataggta | includes mutations of |
| | ttaacatcactaggtttcaaactttacttgctttacatagaagttatttgactcc | the B.1.617.2 variant |
| | tggtgattctttctcaggttggacagctggtgctgcagcttattatgtgggtta | lineage identified in |
| | tcttcaacctaggactttcctattgaaatataatgagaatggaaccattac | India, including T19R, |
| | agatgctgtagactgtgcacttgaccctctctcagaaacaaagtgtacgtt | E156G, Del157/158, |
| | gaaatccttcactgtagagaaaggaatctatcaaacttctaactttagagt | S255F, L452R, |
| | ccaaccaacagaatctattgttagatttcctaatattacaaacttgtgccctt | T478K, D614G, |
| | tcggtgaagtatttaacgccaccagatttgcatctgtttatgcttggaacag | P681R, and D950N |
| | gaagagaatcagcaactgtgttgctgattattctgtcctatataattccgca | |
| | tcattctccacatttaagtgttatggagtgtctcctactaaattaaatgatctct | |
| | gctttactaatgtctatgcagattcatttgtaattagaggtgatgaagtcag | |
| | acaaatcgctccagggcaaactggaaagattgctgattataattataaat | |
| | taccagatgactttacaggctgcgttatagcttggaattctaacaatcttga | |
| | ttctaaggttggtggtaattataattaccggtatagattgtttaggaagtcta | |
| | atctcaaacctttcgagagagatatttcaactgaaatctatcaggccggta | |
| | gcaaaccttgtaatggtgttgaaggatttaattgttactttcctttacaatcat | |
| | atggtttccaacccactaatggtgttggttaccaaccatacagagtagtag | |
| | tactttcatttgaacttctacatgcaccagcaactgtttgtggacctaagaa | |
| | gtctactaatttggttaagaacaaatgtgtcaatttcaacttcaatggtttaa | |
| | caggcacaggtgttcttactgagtctaacaagaagtttctgcctttccaac | |
| | aatttggcagagacattgctgacactactgatgctgtccgtgatccacag | |
| | acacttgagattcttgacattacaccatgttcatttggtggtgtcagtgttata | |
| | acaccaggaacaaatacttctaaccaggttgctgttctttatcagggtgtta | |
| | actgcacagaagtccctgttgctattcatgcagatcaacttactcctacttg | |
| | gcgtgtttattctacaggttctaatgtatttcaaacacgtgcaggctgtttaat | |
| | aggagctgaacatgtcaacaactcatatgagtgtgacatacccattggt | |
| | gcaggtatatgcgctagttatcagactcagactaattctcgtcgggggc | |
| | acgtagtgtagctagtcaatccatcattgcctacactatgtcacttggtgca | |
| | gagaattcagttgcttactctaataactctattgccatacccacaaacttta | |
| | ctattagtgttaccacagaaattctaccagtgtctatgaccaagacatcag | |
| | tagattgtacaatgtacatttgtggtgattcaactgaatgcagcaatctattg | |
| | ttgcaatatggcagtttctgtacacaattaaaccgtgctttaactggaatag | |
| | ctgttgaacaagacaagaacacccaagaagtatttgcacaagtcaaa | |
| | caaatttacaagacaccaccaattaaagatttcggtggatttaatttctcac | |
| | aaatattaccagatccatctaaaccaagcaagaggtcatttattgaagat | |
| | ctactattcaacaaagtgacacttgcagatgctggcttcatcaaacaatat | |
| | ggtgattgccttggtgatattgctgctagagacctcatttgtgcacagaagt | |
| | ttaacggccttactgtattgccacctttgctcacagatgaaatgattgctca | |
| | atacacttctgcactgttagcgggtacaatcacttctggttggacctttggtg | |
| | caggtgctgcattacaaataccatttgctatgcaaatggcttataggtttaa | |
| | tggtattggagttacacagaatgttctctatgagaaccagaaattgattgc | |
| | caaccaatttaatagtgctattggcaagattcaagactcactttcttccaca | |
| | gcaagtgcacttggtaaacttcagaatgtggtcaaccagaatgcacaa | |
| | gctttaaacacgcttgttaaacaacttagctccaactttggtgcaatttcaa | |
| | gtgtattaaatgatatcctttcacgtcttgacaaagttgaggctgaagtgca | |
| | aattgataggttgatcacaggcagacttcaaagtttgcagacatatgtga | |
| | ctcaacaattaattagagctgcagaaatcagagcttctgctaatcttgctg | |
| | ctactaagatgtcagagtgtgtacttggacaatctaagagagttgatttctg | |
| | tggaaagggctatcatcttatgtccttccctcagtcagcacctcatggtgta | |
| | gtcttcttgcatgtgacttatgtccctgcacaagagaagaacttcacaact | |
| | gctcctgccatttgtcatgatggtaaagcacactttcctcgtgaaggtgtctt | |
| | tgtttcaaatggcacacactggtttgtaacacaaaggaatttctatgaacc | |
| | acaaatcattactacagacaacacatttgtgtctggtaactgtgatgttgta | |
| | ataggaattgtcaacaacacagtttatgatcctttgcaacctgaattagac | |
| | tcattcaaggaggagttagataaatatttcaagaatcatacatcaccaga | |
| | tgttgatttaggtgacatctctggcattaatgcttcagttgtaaacattcaga | |
| | aagaaattgaccgcctcaatgaggttgccaagaatttaaatgaatctctc | |
| | atcgatctccaagaacttggaaagtatgagcagtatatcaaatggccat | |
| | ggtacatttggctaggtttcatagctggcttgattgccatagtaatggtgac | |
| | aattatgctttgctgtatgaccagttgctgtagttgtctcaagggctgttgttct | |
| | tgtggatcctgctgcaaatttgatgaagacgactctgagccagtgctcaa | |
| | aggagtcaaattacattacacataa | |
| 12 | MFVFLVLLPLVSSQCVNLRTRTQLPPAYTNSFTRGV | Amino acid sequence |
| | YYPDKVFRSSVLHSTQDLFLPFFSNVTWFHAIHVSG | (N- to C-terminus) of a |
| | TNGTKRFDNPVLPFNDGVYFASTEKSNIIRGWIFGT | codon-optimized |
| | TLDSKTQSLLIVNNATNVVIKVCEFQFCNDPFLGVY | SARS-CoV-2 S |
| | YHKNNKSWMESGVYSSANNCTFEYVSQPFLMDLE | antigen sequence |
| | GKQGNFKNLREFVFKNIDGYFKIYSKHTPINLVRDLP | based on the Wuhan- |
| | QGFSALEPLVDLPIGINITRFQTLLALHRSYLTPGDS | Hu-1 reference strain |
| | FSGWTAGAAAYYVGYLQPRTFLLKYNENGTITDAV | (#NC_045512) and |
| | DCALDPLSETKCTLKSFTVEKGIYQTSNFRVQPTESI | optimized for vaccinia, |
| | VRFPNITNLCPFGEVFNATRFASVYAWNRKRISNCV | which is further |
| | ADYSVLYNSASFSTFKCYGVSPTKLNDLCFTNVYA | modified to encode for |
| | DSFVIRGDEVRQIAPGQTGKIADYNYKLPDDFTGCV | an S antigen that |
| | IAWNSNNLDSKVGGNYNYRYRLFRKSNLKPFERDI | includes mutations of |
| | STEIYQAGSKPCNGVEGFNCYFPLQSYGFQPTNGV | the B.1.617.2 variant |
| | GYQPYRVVVLSFELLHAPATVCGPKKSTNLVKNKC | lineage identified in |
| | VNFNFNGLTGTGVLTESNKKFLPFQQFGRDIADTTD | India, including T19R, |
| | AVRDPQTLEILDITPCSFGGVSVITPGTNTSNQVAVL | E156G, Del157/158, |
| | YQGVNCTEVPVAIHADQLTPTWRVYSTGSNVFQTR | S255F, L452R, |
| | AGCLIGAEHVNNSYECDIPIGAGICASYQTQTNSRR | T478K, D614G, |
| | RARSVASQSIIAYTMSLGAENSVAYSNNSIAIPTNFTI | P681R, and D950N |
| | SVTTEILPVSMTKTSVDCTMYICGDSTECSNLLLQY | |
| | GSFCTQLNRALTGIAVEQDKNTQEVFAQVKQIYKTP | |
| | PIKDFGGFNFSQILPDPSKPSKRSFIEDLLFNKVTLA | |
| | DAGFIKQYGDCLGDIAARDLICAQKFNGLTVLPPLLT | |
| | DEMIAQYTSALLAGTITSGWTFGAGAALQIPFAMQM | |
| | AYRFNGIGVTQNVLYENQKLIANQFNSAIGKIQDSLS | |
| | STASALGKLQNVVNQNAQALNTLVKQLSSNFGAISS | |
| | VLNDILSRLDKVEAEVQIDRLITGRLQSLQTYVTQQL | |
| | IRAAEIRASANLAATKMSECVLGQSKRVDFCGKGY | |
| | HLMSFPQSAPHGVVFLHVTYVPAQEKNFTTAPAIC | |
| | HDGKAHFPREGVFVSNGTHWFVTQRNFYEPQIITT | |
| | DNTFVSGNCDVVIGIVNNTVYDPLQPELDSFKEELD | |
| | KYFKNHTSPDVDLGDISGINASVVNIQKEIDRLNEVA | |
| | KNLNESLIDLQELGKYEQYIKWPWYIWLGFIAGLIAIV | |
| | MVTIMLCCMTSCCSCLKGCCSCGSCCKFDEDDSE | |
| | PVLKGVKLHYT | |
| 13 | atgtttgtctttcttgtcttattgccactagtctctagtcagtgtgttaatcttaca | Nucleotide |
| | accagaactcaattaccacctgcatacactaattctttcacacgtggtgttt | sequence/ORF (5′ to |
| | attaccctgacaaagtattcagatcctcagtattacattcaactcaggactt | 3′ end) of a codon- |
| | gttcttacctttcttctccaatgttacttggttccatgctatacatgtctctggga | optimized SARS-CoV- |
| | ccaatggtactaagaggtttgataaccctgtcctaccatttaatgatggtgt | 2 S antigen sequence |
| | ttatttcgcttccattgagaagtctaacataataagaggctggatatttggta | based on the Wuhan- |
| | ctactttagattcgaagacccagtccctacttattgttaataacgctactaat | Hu-1 reference strain |
| | gttgttattaaagtctgtgaatttcaattctgtaatgatccattcttgggtgtttct | (#NC_045512) and |
| | aaccacaagaacaacaagagttggatggaaagtgagttcagagtttat | optimized for vaccinia, |
| | tctagtgcgaataattgcactttcgaatatgtctctcagcctttccttatggac | which is further |
| | cttgaaggtaaacagggtaatttcaagaatcttagggaatttgtgtttaag | modified to encode for |
| | aatattgatggttatttcaagatatattctaagcacacgcctattaatttagtg | an S antigen that |
| | cgtgatctccctcagggtttctcggctttagaaccattggtagatttgccaat | includes mutations of |
| | aggtattaacatcactaggtttcaaactttacttgctttacatagaagttattt | the B.1.621 variant |
| | gactcctggtgattcttcttcaggttggacagctggtgctgcagcttattatgt | lineage, including |
| | gggttatcttcaacctaggactttcctattgaaatataatgagaatggaac | T95N, Y144S, Y145N, |
| | cattacagatgctgtagactgtgcacttgaccctctctcagaaacaaagt | R346K, E484K, |
| | gtacgttgaaatccttcactgtagagaaaggaatctatcaaacttctaact | N501Y, D614G, |
| | ttagagtccaaccaacagaatctattgttagatttcctaatattacaaactt | P681H, and D950N |
| | gtgccctttcggtgaagtatttaacgccaccaaatttgcatctgtttatgcttg | |
| | gaacaggaagagaatcagcaactgtgttgctgattattctgtcctatataa | |
| | ttccgcatcattctccacatttaagtgttatggagtgtctcctactaaattaaa | |
| | tgatctctgctttactaatgtctatgcagattcatttgtaattagaggtgatga | |
| | agtcagacaaatcgctccagggcaaactggaaagattgctgattataat | |
| | tataaattaccagatgactttacaggctgcgttatagcttggaattctaaca | |
| | atcttgattctaaggttggtggtaattataattacctgtatagattgtttagga | |
| | agtctaatctcaaacctttcgagagagatatttcaactgaaatctatcagg | |
| | ccggtagcacaccttgtaatggtgttaaaggatttaattgttactttcctttac | |
| | aatcatatggtttccaacccacttatggtgttggttaccaaccatacagagt | |
| | agtagtactttcatttgaacttctacatgcaccagcaactgtttgtggaccta | |
| | agaagtctactaatttggttaagaacaaatgtgtcaatttcaacttcaatgg | |
| | tttaacaggcacaggtgttcttactgagtctaacaagaagtttctgcctttcc | |
| | aacaatttggcagagacattgctgacactactgatgctgtccgtgatcca | |
| | cagacacttgagattcttgacattacaccatgttcatttggtggtgtcagtgt | |
| | tataacaccaggaacaaatacttctaaccaggttgctgttctttatcagggt | |
| | gttaactgcacagaagtccctgttgctattcatgcagatcaacttactccta | |
| | cttggcgtgtttattctacaggttctaatgtatttcaaacacgtgcaggctgtt | |
| | taataggagctgaacatgtcaacaactcatatgagtgtgacatacccatt | |
| | ggtgcaggtatatgcgctagttatcagactcagactaattctcatcggcgg | |
| | gcacgtagtgtagctagtcaatccatcattgcctacactatgtcacttggtg | |
| | cagagaattcagttgcttactctaataactctattgccatacccacaaactt | |
| | tactattagtgttaccacagaaattctaccagtgtctatgaccaagacatc | |
| | agtagattgtacaatgtacatttgtggtgattcaactgaatgcagcaatcta | |
| | ttgttgcaatatggcagtttctgtacacaattaaaccgtgctttaactggaat | |
| | agctgttgaacaagacaagaacacccaagaagtatttgcacaagtca | |
| | aacaaatttacaagacaccaccaattaaagatttcggtggatttaatttct | |
| | cacaaatattaccagatccatctaaaccaagcaagaggtcatttattga | |
| | agatctactattcaacaaagtgacacttgcagatgctggcttcatcaaac | |
| | aatatggtgattgccttggtgatattgctgctagagacctcatttgtgcaca | |
| | gaagtttaacggccttactgtattgccacctttgctcacagatgaaatgatt | |
| | gctcaatacacttctgcactgttagcgggtacaatcacttctggttggacct | |
| | ttggtgcaggtgctgcattacaaataccatttgctatgcaaatggcttatag | |
| | gtttaatggtattggagttacacagaatgttctctatgagaaccagaaatt | |
| | gattgccaaccaatttaatagtgctattggcaagattcaagactcactttctt | |
| | ccacagcaagtgcacttggtaaacttcagaatgtggtcaaccagaatgc | |
| | acaagctttaaacacgcttgttaaacaacttagctccaactttggtgcaatt | |
| | tcaagtgtattaaatgatatcctttcacgtcttgacaaagttgaggctgaag | |
| | tgcaaattgataggttgatcacaggcagacttcaaagtttgcagacatat | |
| | gtgactcaacaattaattagagctgcagaaatcagagcttctgctaatctt | |
| | gctgctactaagatgtcagagtgtgtacttggacaatctaagagagttgat | |
| | ttctgtggaaagggctatcatcttatgtccttccctcagtcagcacctcatg | |
| | gtgtagtcttcttgcatgtgacttatgtccctgcacaagagaagaacttcac | |
| | aactgctcctgccatttgtcatgatggtaaagcacactttcctcgtgaaggt | |
| | gtctttgtttcaaatggcacacactggtttgtaacacaaaggaatttctatg | |
| | aaccacaaatcattactacagacaacacatttgtgtctggtaactgtgatg | |
| | ttgtaataggaattgtcaacaacacagtttatgatcctttgcaacctgaatt | |
| | agactcattcaaggaggagttagataaatatttcaagaatcatacatcac | |
| | cagatgttgatttaggtgacatctctggcattaatgcttcagttgtaaacatt | |
| | cagaaagaaattgaccgcctcaatgaggttgccaagaatttaaatgaat | |
| | ctctcatcgatctccaagaacttggaaagtatgagcagtatatcaaatgg | |
| | ccatggtacatttggctaggtttcatagctggcttgattgccatagtaatggt | |
| | gacaattatgctttgctgtatgaccagttgctgtagttgtctcaagggctgtt | |
| | gttcttgtggatcctgctgcaaatttgatgaagacgactctgagccagtgct | |
| | caaaggagtcaaattacattacacataa | |
| 14 | MFVFLVLLPLVSSQCVNLTTRTQLPPAYTNSFTRGV | Amino acid sequence |
| | YYPDKVFRSSVLHSTQDLFLPFFSNVTWFHAIHVSG | (N- to C-terminus) of a |
| | TNGTKRFDNPVLPFNDGVYFASIEKSNIIRGWIFGTT | codon-optimized |
| | LDSKTQSLLIVNNATNVVIKVCEFQFCNDPFLGVSN | SARS-CoV-2 S |
| | HKNNKSWMESEFRVYSSANNCTFEYVSQPFLMDL | antigen sequence |
| | EGKQGNFKNLREFVFKNIDGYFKIYSKHTPINLVRDL | based on the Wuhan- |
| | PQGFSALEPLVDLPIGINITRFQTLLALHRSYLTPGD | Hu-1 reference strain |
| | SSSGWTAGAAAYYVGYLQPRTFLLKYNENGTITDA | (#NC_045512) and |
| | VDCALDPLSETKCTLKSFTVEKGIYQTSNFRVQPTE | optimized for vaccinia, |
| | SIVRFPNITNLCPFGEVFNATKFASVYAWNRKRISN | which is further |
| | CVADYSVLYNSASFSTFKCYGVSPTKLNDLCFTNV | modified to encode for |
| | YADSFVIRGDEVRQIAPGQTGKIADYNYKLPDDFTG | an S antigen that |
| | CVIAWNSNNLDSKVGGNYNYLYRLFRKSNLKPFER | includes mutations of |
| | DISTEIYQAGSTPCNGVKGFNCYFPLQSYGFQPTY | the B.1.621 variant |
| | GVGYQPYRVVVLSFELLHAPATVCGPKKSTNLVKN | lineage, including |
| | KCVNFNFNGLTGTGVLTESNKKFLPFQQFGRDIAD | T95N, Y144S, Y145N, |
| | TTDAVRDPQTLEILDITPCSFGGVSVITPGTNTSNQV | R346K, E484K, |
| | AVLYQGVNCTEVPVAIHADQLTPTWRVYSTGSNVF | N501Y, D614G, |
| | QTRAGCLIGAEHVNNSYECDIPIGAGICASYQTQTN | P681H, and D950N |
| | SHRRARSVASQSIIAYTMSLGAENSVAYSNNSIAIPT | |
| | NFTISVTTEILPVSMTKTSVDCTMYICGDSTECSNLL | |
| | LQYGSFCTQLNRALTGIAVEQDKNTQEVFAQVKQIY | |
| | KTPPIKDFGGFNFSQILPDPSKPSKRSFIEDLLFNKV | |
| | TLADAGFIKQYGDCLGDIAARDLICAQKFNGLTVLPP | |
| | LLTDEMIAQYTSALLAGTITSGWTFGAGAALQIPFA | |
| | MQMAYRFNGIGVTQNVLYENQKLIANQFNSAIGKIQ | |
| | DSLSSTASALGKLQNVVNQNAQALNTLVKQLSSNF | |
| | GAISSVLNDILSRLDKVEAEVQIDRLITGRLQSLQTY | |
| | VTQQLIRAAEIRASANLAATKMSECVLGQSKRVDFC | |
| | GKGYHLMSFPQSAPHGVVFLHVTYVPAQEKNFTTA | |
| | PAICHDGKAHFPREGVFVSNGTHWFVTQRNFYEP | |
| | QIITTDNTFVSGNCDVVIGIVNNTVYDPLQPELDSFK | |
| | EELDKYFKNHTSPDVDLGDISGINASVVNIQKEIDRL | |
| | NEVAKNLNESLIDLQELGKYEQYIKWPWYIWLGFIA | |
| | GLIAIVMVTIMLCCMTSCCSCLKGCCSCGSCCKFDE | |
| | DDSEPVLKGVKLHYT | |
| 15 | atgtttgtctttcttgtcttattgctactagtctctagtcagtgtgttaatcttaca | Nucleotide |
| | accagaactcaattaccacctgcatacactaattctttcacacgtggtgttt | sequence/ORF (5′ to |
| | attaccctgacaaagtattcagatcctcagtattacattcaactcaggactt | 3′ end) of a codon- |
| | gttcttacctttcttctccaatgttacttggttccatgctatacatgtctctggga | optimized SARS-CoV- |
| | ccaatggtactaagaggtttgataaccctgtcctaccatttaatgatggtgt | 2 S antigen sequence |
| | ttatttcgcttccactgagaagtctaacataataagaggctggatatttggt | based on the Wuhan- |
| | actactttagattcgaagacccagtccctacttattgttaataacgctacta | Hu-1 reference strain |
| | atgttgttattaaagtctgtgaatttcaattctttaatgatccattcttgggtgttt | (#NC_045512) and |
| | accacaagaacaacaagagttggatggaaagtgagttcagagtttattc | optimized for vaccinia, |
| | tagtgcgaataattgcactttcgaatatgtctctcagcctttccttatggacct | which is further |
| | tgaaggtaaacagggtaatttcaagaatcttagcgaatttgtgtttaagaa | modified to encode for |
| | tattgatggttatttcaagatatattctaagcacacgcctattaatttagtgcg | an S antigen that |
| | tggtctccctcagggtttctcggctttagaaccattggtagatttgccaatag | includes mutations of |
| | gtattaacatcactaggtttcaaactttattacatagaagttatttgactcctg | the C.1.2 variant |
| | gtgattcttcttcaggttggacagctggtgctgcagcttattatgtgggttatc | lineage, including |
| | ttcaacctaggactttcctattgaaatataatgagaatggaaccattacag | P9L, C136F, R190S, |
| | atgctgtagactgtgcacttgaccctctctcagaaacaaagtgtacgttga | D215G, Del242/243, |
| | aatccttcactgtagagaaaggaatctatcaaacttctaactttagagtcc | Y449Y, E484K, |
| | aaccaacagaatctattgttagatttcctaatattacaaacttgtgccctttc | N501Y, D614G, |
| | ggtgaagtatttaacgccaccagatttgcatctgtttatgcttggaacagg | H655Y, N679K, |
| | aagagaatcagcaactgtgttgctgattattctgtcctatataattccgcatc | T716I, and T859N |
| | attctccacatttaagtgttatggagtgtctcctactaaattaaatgatctctg | |
| | ctttactaatgtctatgcagattcatttgtaattagaggtgatgaagtcagac | |
| | aaatcgctccagggcaaactggaaagattgctgattataattataaatta | |
| | ccagatgactttacaggctgcgttatagcttggaattctaacaatcttgattc | |
| | taaggttggtggtaatcataattacctgtatagattgtttaggaagtctaatc | |
| | tcaaacctttcgagagagatatttcaactgaaatctatcaggccggtagc | |
| | acaccttgtaatggtgttaaaggatttaattgttactttcctttacaatcatatg | |
| | gtttccaacccacttatggtgttggttaccaaccatacagagtagtagtact | |
| | ttcatttgaacttctacatgcaccagcaactgtttgtggacctaagaagtct | |
| | actaatttggttaagaacaaatgtgtcaatttcaacttcaatggtttaacag | |
| | gcacaggtgttcttactgagtctaacaagaagtttctgcctttccaacaattt | |
| | ggcagagacattgctgacactactgatgctgtccgtgatccacagacac | |
| | ttgagattcttgacattacaccatgttcatttggtggtgtcagtgttataacac | |
| | caggaacaaatacttctaaccaggttgctgttctttatcagggtgttaactg | |
| | cacagaagtccctgttgctattcatgcagatcaacttactcctacttggcgt | |
| | gtttattctacaggttctaatgtatttcaaacacgtgcaggctgtttaatagg | |
| | agctgaatatgtcaacaactcatatgagtgtgacatacccattggtgcag | |
| | gtatatgcgctagttatcagactcagactaagtctcctcgggggcacgt | |
| | agtgtagctagtcaatccatcattgcctacactatgtcacttggtgcagag | |
| | aattcagttgcttactctaataactctattgccatacccataaactttactatt | |
| | agtgttaccacagaaattctaccagtgtctatgaccaagacatcagtag | |
| | attgtacaatgtacatttgtggtgattcaactgaatgcagcaatctattgttg | |
| | caatatggcagtttctgtacacaattaaaccgtgctttaactggaatagct | |
| | gttgaacaagacaagaacacccaagaagtatttgcacaagtcaaaca | |
| | aatttacaagacaccaccaattaaagatttcggtggatttaatttctcaca | |
| | aatattaccagatccatctaaaccaagcaagaggtcatttattgaagatc | |
| | tactattcaacaaagtgacacttgcagatgctggcttcatcaaacaatatg | |
| | gtgattgccttggtgatattgctgctagagacctcatttgtgcacagaagttt | |
| | aacggccttaatgtattgccacctttgctcacagatgaaatgattgctcaat | |
| | acacttctgcactgttagcgggtacaatcacttctggttggacctttggtgc | |
| | aggtgctgcattacaaataccatttgctatgcaaatggcttataggtttaat | |
| | ggtattggagttacacagaatgttctctatgagaaccagaaattgattgcc | |
| | aaccaatttaatagtgctattggcaagattcaagactcactttcttccacag | |
| | caagtgcacttggtaaacttcaagatgtggtcaaccagaatgcacaag | |
| | ctttaaacacgcttgttaaacaacttagctccaactttggtgcaatttcaagt | |
| | gtattaaatgatatcctttcacgtcttgacaaagttgaggctgaagtgcaa | |
| | attgataggttgatcacaggcagacttcaaagtttgcagacatatgtgact | |
| | caacaattaattagagctgcagaaatcagagcttctgctaatcttgctgct | |
| | actaagatgtcagagtgtgtacttggacaatctaagagagttgatttctgt | |
| | ggaaagggctatcatcttatgtccttccctcagtcagcacctcatggtgta | |
| | gtcttcttgcatgtgacttatgtccctgcacaagagaagaacttcacaact | |
| | gctcctgccatttgtcatgatggtaaagcacactttcctcgtgaaggtgtctt | |
| | tgtttcaaatggcacacactggtttgtaacacaaaggaatttctatgaacc | |
| | acaaatcattactacagacaacacatttgtgtctggtaactgtgatgttgta | |
| | ataggaattgtcaacaacacagtttatgatcctttgcaacctgaattagac | |
| | tcattcaaggaggagttagataaatatttcaagaatcatacatcaccaga | |
| | tgttgatttaggtgacatctctggcattaatgcttcagttgtaaacattcaga | |
| | aagaaattgaccgcctcaatgaggttgccaagaatttaaatgaatctctc | |
| | atcgatctccaagaacttggaaagtatgagcagtatatcaaatggccat | |
| | ggtacatttggctaggtttcatagctggcttgattgccatagtaatggtgac | |
| | aattatgctttgctgtatgaccagttgctgtagttgtctcaagggctgttgttct | |
| | tgtggatcctgctgcaaatttgatgaagacgactctgagccagtgctcaa | |
| | aggagtcaaattacattacacataa | |
| 16 | MFVFLVLLLLVSSQCVNLTTRTQLPPAYTNSFTRGV | Amino acid sequence |
| | YYPDKVFRSSVLHSTQDLFLPFFSNVTWFHAIHVSG | (N- to C-terminus) of a |
| | TNGTKRFDNPVLPFNDGVYFASTEKSNIIRGWIFGT | codon-optimized |
| | TLDSKTQSLLIVNNATNVVIKVCEFQFFNDPFLGVYH | SARS-COV-2 S |
| | KNNKSWMESEFRVYSSANNCTFEYVSQPFLMDLE | antigen sequence |
| | GKQGNFKNLSEFVFKNIDGYFKIYSKHTPINLVRGLP | based on the Wuhan- |
| | QGFSALEPLVDLPIGINITRFQTLLHRSYLTPGDSSS | Hu-1 reference strain |
| | GWTAGAAAYYVGYLQPRTFLLKYNENGTITDAVDC | (#NC_045512) and |
| | ALDPLSETKCTLKSFTVEKGIYQTSNFRVQPTESIVR | optimized for vaccinia, |
| | FPNITNLCPFGEVFNATRFASVYAWNRKRISNCVAD | which is further |
| | YSVLYNSASFSTFKCYGVSPTKLNDLCFTNVYADSF | modified to encode for |
| | VIRGDEVRQIAPGQTGKIADYNYKLPDDFTGCVIAW | an S antigen that |
| | NSNNLDSKVGGNHNYLYRLFRKSNLKPFERDISTEI | includes mutations of |
| | YQAGSTPCNGVKGFNCYFPLQSYGFQPTYGVGYQ | the C.1.2 variant |
| | PYRVVVLSFELLHAPATVCGPKKSTNLVKNKCVNF | lineage, including |
| | NFNGLTGTGVLTESNKKFLPFQQFGRDIADTTDAV | P9L, C136F, R190S, |
| | RDPQTLEILDITPCSFGGVSVITPGTNTSNQVAVLYQ | D215G, Del242/243, |
| | GVNCTEVPVAIHADQLTPTWRVYSTGSNVFQTRAG | Y449Y, E484K, |
| | CLIGAEYVNNSYECDIPIGAGICASYQTQTKSPRRA | N501Y, D614G, |
| | RSVASQSIIAYTMSLGAENSVAYSNNSIAIPINFTISV | H655Y, N679K, |
| | TTEILPVSMTKTSVDCTMYICGDSTECSNLLLQYGS | T716I, and T859N |
| | FCTQLNRALTGIAVEQDKNTQEVFAQVKQIYKTPPI | |
| | KDFGGFNFSQILPDPSKPSKRSFIEDLLFNKVTLADA | |
| | GFIKQYGDCLGDIAARDLICAQKFNGLNVLPPLLTDE | |
| | MIAQYTSALLAGTITSGWTFGAGAALQIPFAMQMAY | |
| | RFNGIGVTQNVLYENQKLIANQFNSAIGKIQDSLSST | |
| | ASALGKLQDVVNQNAQALNTLVKQLSSNFGAISSVL | |
| | NDILSRLDKVEAEVQIDRLITGRLQSLQTYVTQQLIR | |
| | AAEIRASANLAATKMSECVLGQSKRVDFCGKGYHL | |
| | MSFPQSAPHGVVFLHVTYVPAQEKNFTTAPAICHD | |
| | GKAHFPREGVFVSNGTHWFVTQRNFYEPQIITTDN | |
| | TFVSGNCDVVIGIVNNTVYDPLQPELDSFKEELDKY | |
| | FKNHTSPDVDLGDISGINASVVNIQKEIDRLNEVAKN | |
| | LNESLIDLQELGKYEQYIKWPWYIWLGFIAGLIAIVM | |
| | VTIMLCCMTSCCSCLKGCCSCGSCCKFDEDDSEPV | |
| | LKGVKLHYT | |
| 17 | atgtctgataacggaccacagaatcagcgaaacgcaccacgcattac | Nucleotide |
| | gtttggtggaccctcagattcaactggcagtaaccagaatggagaacg | sequence/ORF (5′ to |
| | cagtggagcgcgatctaaacaacgtcggcctcaaggtttacccaataat | 3′ end) of a codon- |
| | actgcgtcttggttcaccgctctcactcaacatggcaaggaaggccttaa | optimized SARS-COV- |
| | attccctcgaggacaaggcgttccaattaacaccaatagcagtccagat | 2 N antigen sequence |
| | gaccaaattggctactaccgaagagctaccagacgaattcgtggtggt | based on the Wuhan- |
| | gacggtaagatgaaagatctcagtccaagatggtatttctactacctagg | Hu-1 reference strain |
| | aactgggccagaagctggacttccctatggtgctaacaaagacggcat | (#NC_045512) and |
| | catatgggttgcaactgagggagccttgaatacacctaaagatcacatt | optimized for vaccinia, |
| | ggcacccgcaatcctgctaacaatgctgcaatcgtgctacaacttcctca | which is further |
| | aggaacaacattgcctaaaggcttctacgcagaagggagcagaggc | modified to encode for |
| | ggcagtcaagcctcttctcgttcctcatcacgtagtcgcaacagttcaaga | an N antigen that |
| | aattcaactccaggcagcagtatgggaacttctcctgctagaatggctgg | includes mutations of |
| | caatggctgtgatgctgctcttgctttgctgctgcttgacagattgaaccag | the B. 1.617.2 variant |
| | cttgagagcaagatgtctggtaaaggccaacaacaacaaggccaaa | lineage identified in |
| | ctgtcactaagaaatctgctgctgaggcttctaagaagcctcggcagaa | India, including D63G, |
| | acgtactgccactaaagcatacaatgtaacacaagctttcggcagacgt | R203M, G215C, and |
| | ggtccagaacaaacccaaggaaactttggagaccaggaactaatca | D377Y |
| | gacaaggaactgattacaaacattggccgcaaattgcacaatttgctcc | |
| | cagcgcttcagcgttcttcggaatgtcgcgcattggcatggaagtcacac | |
| | cttcgggaacgtggttgacctacacaggtgccatcaaattggatgacaa | |
| | agatccaaatttcaaagatcaagtcatattgctgaataagcatattgacg | |
| | catacaagacattcccaccaacagagcctaagaaggacaagaagaa | |
| | gaaggcttatgaaactcaagccttaccgcagagacagaagaaacag | |
| | caaactgtgactcttcttcctgctgcagatttggatgatttctccaaacaatt | |
| | gcaacaatccatgagcagtgctgactcaactcaggcctaa | |
| 18 | MSDNGPQNQRNAPRITFGGPSDSTGSNQNGERSG | Amino acid sequence |
| | ARSKQRRPQGLPNNTASWFTALTQHGKEGLKFPR | (N- to C-terminus) of a |
| | GQGVPINTNSSPDDQIGYYRRATRRIRGGDGKMKD | codon-optimized |
| | LSPRWYFYYLGTGPEAGLPYGANKDGIIWVATEGA | SARS-COV-2 N |
| | LNTPKDHIGTRNPANNAAIVLQLPQGTTLPKGFYAE | antigen sequence |
| | GSRGGSQASSRSSSRSRNSSRNSTPGSSMGTSPA | based on the Wuhan- |
| | RMAGNGCDAALALLLLDRLNQLESKMSGKGQQQQ | Hu-1 reference strain |
| | GQTVTKKSAAEASKKPRQKRTATKAYNVTQAFGRR | (#NC_045512) and |
| | GPEQTQGNFGDQELIRQGTDYKHWPQIAQFAPSA | optimized for vaccinia, |
| | SAFFGMSRIGMEVTPSGTWLTYTGAIKLDDKDPNF | which is further |
| | KDQVILLNKHIDAYKTFPPTEPKKDKKKKAYETQALP | modified to encode for |
| | QRQKKQQTVTLLPAADLDDFSKQLQQSMSSADST | an N antigen that |
| | QA | includes mutations of |
| | | the B.1.617.2 variant |
| | | lineage identified in |
| | | India, including D63G, |
| | | R203M, G215C, and |
| | | D377Y |
| 19 | atgtctgataacggaccacagaatcagcgaaacgcactacgcattacg | Nucleotide |
| | tttggtggaccctcagattcaactggcagtaaccagaatggagaacgc | sequence/ORF (5′ to |
| | agtggagcgcgatctaaacaacgtcggcctcaaggtttacccaataata | 3′ end) of a codon- |
| | ctgcgtcttggttcaccgctctcactcaacatggcaaggaagaccttaaa | optimized SARS-CoV- |
| | ttccctcgaggacaaggcgttccaattaacaccaatagcagtccagatg | 2 N antigen sequence |
| | accaaattggctactaccgaagagctaccagacgaattcgtggtggtg | based on the Wuhan- |
| | acggtaagatgaaagatctcagtccaagatggtatttctactacctagga | Hu-1 reference strain |
| | actgggccagaagctggacttccctatggtgctaacaaagacggcatc | (#NC_045512) and |
| | atatgggttgcaactgagggagccttgaatacacctaaagatcacattg | optimized for vaccinia, |
| | gcacccgcaatcctgctaacaatgctgcaatcgtgctacaacttcctcaa | which is further |
| | ggaacaacattgcctaaaggcttctacgcagaagggagcagaggcg | modified to encode for |
| | gcagtcaagcctcttctcgttcctcatcacgtagtcgcaacagttcaagaa | an N antigen that |
| | attcaactccaggcagcagtaaacgaacttctcctgctagaatggctgg | includes mutations of |
| | caatggcggtgatgctgctcttgctttgctgctgcttgacagattgaaccag | the C.1.2 variant |
| | cttgagagcaagatgtctggtaaaggccaacaacaacaaggccaaa | lineage, including |
| | ctgtcactaagaaatctgctgctgaggcttctaagaagcctcggcagaa | P13L, R203K, G204R, |
| | acgtactgccactaaagcatacaatgtaacacaagctttcggcagacgt | and Q384H |
| | ggtccagaacaaacccaaggaaactttggagaccaggaactaatca | |
| | gacaaggaactgattacaaacattggccgcaaattgcacaatttgctcc | |
| | cagcgcttcagcgttcttcggaatgtcgcgcattggcatggaagtcacac | |
| | cttcgggaacgtggttgacctacacaggtgccatcaaattggatgacaa | |
| | agatccaaatttcaaagatcaagtcatattgctgaataagcatattgacg | |
| | catacaagacattcccaccaacagagcctaagaaggacaagaagaa | |
| | gaaggctgatgaaactcaagccttaccgcacagacagaagaaacag | |
| | caaactgtgactcttcttcctgctgcagatttggatgatttctccaaacaatt | |
| | gcaacaatccatgagcagtgctgactcaactcaggcctaa | |
| 20 | MSDNGPQNQRNALRITFGGPSDSTGSNQNGERSG | Amino acid sequence |
| | ARSKQRRPQGLPNNTASWFTALTQHGKEDLKFPR | (N- to C-terminus) of a |
| | GQGVPINTNSSPDDQIGYYRRATRRIRGGDGKMKD | codon-optimized |
| | LSPRWYFYYLGTGPEAGLPYGANKDGIIWVATEGA | SARS-CoV-2 N |
| | LNTPKDHIGTRNPANNAAIVLQLPQGTTLPKGFYAE | antigen sequence |
| | GSRGGSQASSRSSSRSRNSSRNSTPGSSKRTSPA | based on the Wuhan- |
| | RMAGNGGDAALALLLLDRLNQLESKMSGKGQQQQ | Hu-1 reference strain |
| | GQTVTKKSAAEASKKPRQKRTATKAYNVTQAFGRR | (#NC_045512) and |
| | GPEQTQGNFGDQELIRQGTDYKHWPQIAQFAPSA | optimized for vaccinia, |
| | SAFFGMSRIGMEVTPSGTWLTYTGAIKLDDKDPNF | which is further |
| | KDQVILLNKHIDAYKTFPPTEPKKDKKKKADETQAL | modified to encode for |
| | PHRQKKQQTVTLLPAADLDDFSKQLQQSMSSADST | an N antigen that |
| | QA | includes mutations of |
| | | the C.1.2 variant |
| | | lineage, including |
| | | P13L, R203K, G204R, |
| | | and Q384H |
| 21 | atgtttgtctttcttgtcttattgccactagtctctagtcagtgtgttaactttaca | Nucleotide |
| | accagaactcaattaccacctgcatacactaattctttcacacgtggtgttt | sequence/ORF (5′ to |
| | attaccctgacaaagtattcagatcctcagtattacattcaactcaggactt | 3′ end) of a codon- |
| | gttcttacctttcttctccaatgttacttggttccatgctatacatgtctctggga | optimized SARS-CoV- |
| | ccaatggtactaagaggtttgctaaccctgtcctaccatttaatgatggtgtt | 2 S antigen sequence |
| | tatttcgcttccactgagaagtctaacataataagaggctggatatttggta | based on the Wuhan- |
| | ctactttagattcgaagacccagtccctacttattgttaataacgctactaat | Hu-1 reference strain |
| | gttgttattaaagtctgtgaatttcaattctgtaatgatccattcttgggtgtttat | (#NC_045512) and |
| | taccacaagaacaacaagagttggatggaaagtgagttcagagtttatt | optimized for vaccinia, |
| | ctagtgcgaataattgcactttcgaatatgtctctcagcctttccttatggac | which is further |
| | cttgaaggtaaacagggtaatttcaagaatcttagggaatttgtgtttaag | modified to encode for |
| | aatattgatggttatttcaagatatattctaagcacacgcctattaatttagtg | an S antigen that |
| | cgtggtctccctcagggtttctcggctttagaaccattggtagatttgccaat | includes mutations of |
| | aggtattaacatcactaggtttcaaactttacatataagttatttgactcctg | the B.1.351 variant |
| | gtgattcttcttcaggttggacagctggtgctgcagcttattatgtgggttatc | lineage, including |
| | ttcaacctaggactttcctattgaaatataatgagaatggaaccattacag | L18F, D80A, D215G, |
| | atgctgtagactgtgcacttgaccctctctcagaaacaaagtgtacgttga | Del242-244, R246I, |
| | aatccttcactgtagagaaaggaatctatcaaacttctaactttagagtcc | N501Y, E484K, |
| | aaccaacagaatctattgttagatttcctaatattacaaacttgtgccctttc | K417N, D614G, and |
| | ggtgaagtatttaacgccaccagatttgcatctgtttatgcttggaacagg | A701V |
| | aagagaatcagcaactgtgttgctgattattctgtcctatataattccgcatc | |
| | attctccacatttaagtgttatggagtgtctcctactaaattaaatgatctctg | |
| | ctttactaatgtctatgcagattcatttgtaattagaggtgatgaagtcagac | |
| | aaatcgctccagggcaaactggaaatattgctgattataattataaattac | |
| | cagatgactttacaggctgcgttatagcttggaattctaacaatcttgattct | |
| | aaggttggtggtaattataattacctgtatagattgtttaggaagtctaatct | |
| | caaacctttcgagagagatatttcaactgaaatctatcaggccggtagc | |
| | acaccttgtaatggtgttaaaggatttaattgttactttcctttacaatcatatg | |
| | gtttccaacccacttatggtgttggttaccaaccatacagagtagtagtact | |
| | ttcatttgaacttctacatgcaccagcaactgtttgtggacctaagaagtct | |
| | actaatttggttaagaacaaatgtgtcaatttcaacttcaatggtttaacag | |
| | gcacaggtgttcttactgagtctaacaagaagtttctgcctttccaacaattt | |
| | ggcagagacattgctgacactactgatgctgtccgtgatccacagacac | |
| | ttgagattcttgacattacaccatgttcatttggtggtgtcagtgttataacac | |
| | caggaacaaatacttctaaccaggttgctgttctttatcagggtgttaactg | |
| | cacagaagtccctgttgctattcatgcagatcaacttactcctacttggcgt | |
| | gtttattctacaggttctaatgtatttcaaacacgtgcaggctgtttaatagg | |
| | agctgaacatgtcaacaactcatatgagtgtgacatacccattggtgca | |
| | ggtatatgcgctagttatcagactcagactaattctcctcggcgggcacgt | |
| | agtgtagctagtcaatccatcattgcctacactatgtcacttggtgtagaga | |
| | attcagttgcttactctaataactctattgccatacccacaaactttactatta | |
| | gtgttaccacagaaattctaccagtgtctatgaccaagacatcagtagatt | |
| | gtacaatgtacatttgtggtgattcaactgaatgcagcaatctattgttgca | |
| | atatggcagtttctgtacacaattaaaccgtgctttaactggaatagctgtt | |
| | gaacaagacaagaacacccaagaagtatttgcacaagtcaaacaaa | |
| | tttacaagacaccaccaattaaagatttcggtggatttaatttctcacaaat | |
| | attaccagatccatctaaaccaagcaagaggtcatttattgaagatctact | |
| | attcaacaaagtgacacttgcagatgctggcttcatcaaacaatatggtg | |
| | attgccttggtgatattgctgctagagacctcatttgtgcacagaagtttaa | |
| | cggccttactgtattgccacctttgctcacagatgaaatgattgctcaatac | |
| | acttctgcactgttagcgggtacaatcacttctggttggacctttggtgcag | |
| | gtgctgcattacaaataccatttgctatgcaaatggcttataggtttaatggt | |
| | attggagttacacagaatgttctctatgagaaccagaaattgattgccaa | |
| | ccaatttaatagtgctattggcaagattcaagactcactttcttccacagca | |
| | agtgcacttggtaaacttcaagatgtggtcaaccagaatgcacaagcttt | |
| | aaacacgcttgttaaacaacttagctccaactttggtgcaatttcaagtgta | |
| | ttaaatgatatcctttcacgtcttgacaaagttgaggctgaagtgcaaattg | |
| | ataggttgatcacaggcagacttcaaagtttgcagacatatgtgactcaa | |
| | caattaattagagctgcagaaatcagagcttctgctaatcttgctgctacta | |
| | agatgtcagagtgtgtacttggacaatctaagagagttgatttctgtggaa | |
| | agggctatcatcttatgtccttccctcagtcagcacctcatggtgtagtcttct | |
| | tgcatgtgacttatgtccctgcacaagagaagaacttcacaactgctcct | |
| | gccatttgtcatgatggtaaagcacactttcctcgtgaaggtgtctttgtttca | |
| | aatggcacacactggtttgtaacacaaaggaatttctatgaaccacaaa | |
| | tcattactacagacaacacatttgtgtctggtaactgtgatgttgtaatagg | |
| | aattgtcaacaacacagtttatgatcctttgcaacctgaattagactcattc | |
| | aaggaggagttagataaatatttcaagaatcatacatcaccagatgttg | |
| | atttaggtgacatctctggcattaatgcttcagttgtaaacattcagaaaga | |
| | aattgaccgcctcaatgaggttgccaagaatttaaatgaatctctcatcga | |
| | tctccaagaacttggaaagtatgagcagtatatcaaatggccatggtac | |
| | atttggctaggtttcatagctggcttgattgccatagtaatggtgacaattat | |
| | gctttgctgtatgaccagttgctgtagttgtctcaagggctgttgttcttgtgg | |
| | atcctgctgcaaatttgatgaagacgactctgagccagtgctcaaagga | |
| | gtcaaattacattacacataa | |
| 22 | MFVFLVLLPLVSSQCVNFTTRTQLPPAYTNSFTRGV | Amino acid sequence |
| | YYPDKVFRSSVLHSTQDLFLPFFSNVTWFHAIHVSG | (N- to C-terminus) of a |
| | TNGTKRFANPVLPFNDGVYFASTEKSNIIRGWIFGT | codon-optimized |
| | TLDSKTQSLLIVNNATNVVIKVCEFQFCNDPFLGVY | SARS-CoV-2 S |
| | YHKNNKSWMESEFRVYSSANNCTFEYVSQPFLMD | antigen sequence |
| | LEGKQGNFKNLREFVFKNIDGYFKIYSKHTPINLVR | based on the Wuhan- |
| | GLPQGFSALEPLVDLPIGINITRFQTLHISYLTPGDSS | Hu-1 reference strain |
| | SGWTAGAAAYYVGYLQPRTFLLKYNENGTITDAVD | (#NC_045512) and |
| | CALDPLSETKCTLKSFTVEKGIYQTSNFRVQPTESIV | optimized for vaccinia, |
| | RFPNITNLCPFGEVFNATRFASVYAWNRKRISNCVA | which is further |
| | DYSVLYNSASFSTFKCYGVSPTKLNDLCFTNVYAD | modified to encode for |
| | SFVIRGDEVRQIAPGQTGNIADYNYKLPDDFTGCVI | an S antigen that |
| | AWNSNNLDSKVGGNYNYLYRLFRKSNLKPFERDIS | includes mutations of |
| | TEIYQAGSTPCNGVKGFNCYFPLQSYGFQPTYGVG | the B.1.351 variant |
| | YQPYRVVVLSFELLHAPATVCGPKKSTNLVKNKCV | lineage, including |
| | NFNFNGLTGTGVLTESNKKFLPFQQFGRDIADTTDA | L18F, D80A, D215G, |
| | VRDPQTLEILDITPCSFGGVSVITPGTNTSNQVAVLY | Del242-244, R246I, |
| | QGVNCTEVPVAIHADQLTPTWRVYSTGSNVFQTRA | N501Y, E484K, |
| | GCLIGAEHVNNSYECDIPIGAGICASYQTQTNSPRR | K417N, D614G, and |
| | ARSVASQSIIAYTMSLGVENSVAYSNNSIAIPTNFTIS | A701V |
| | VTTEILPVSMTKTSVDCTMYICGDSTECSNLLLQYG | |
| | SFCTQLNRALTGIAVEQDKNTQEVFAQVKQIYKTPP | |
| | IKDFGGFNFSQILPDPSKPSKRSFIEDLLFNKVTLAD | |
| | AGFIKQYGDCLGDIAARDLICAQKFNGLTVLPPLLTD | |
| | EMIAQYTSALLAGTITSGWTFGAGAALQIPFAMQMA | |
| | YRFNGIGVTQNVLYENQKLIANQFNSAIGKIQDSLSS | |
| | TASALGKLQDVVNQNAQALNTLVKQLSSNFGAISSV | |
| | LNDILSRLDKVEAEVQIDRLITGRLQSLQTYVTQQLI | |
| | RAAEIRASANLAATKMSECVLGQSKRVDFCGKGYH | |
| | LMSFPQSAPHGVVFLHVTYVPAQEKNFTTAPAICH | |
| | DGKAHFPREGVFVSNGTHWFVTQRNFYEPQIITTD | |
| | NTFVSGNCDVVIGIVNNTVYDPLQPELDSFKEELDK | |
| | YFKNHTSPDVDLGDISGINASVVNIQKEIDRLNEVAK | |
| | NLNESLIDLQELGKYEQYIKWPWYIWLGFIAGLIAIV | |
| | MVTIMLCCMTSCCSCLKGCCSCGSCCKFDEDDSE | |
| | PVLKGVKLHYT | |
| 23 | atgtctgataacggaccacagaatcagcgaaacgcaccacgcattac | Nucleotide |
| | gtttggtggaccctcagattcaactggcagtaaccagaatggagaacg | sequence/ORF (5′ to |
| | cagtggagcgcgatctaaacaacgtcggcctcaaggtttacccaataat | 3′ end) of a codon- |
| | actgcgtcttggttcaccgctctcactcaacatggcaaggaagaccttaa | optimized SARS-CoV- |
| | attccctcgaggacaaggcgttccaattaacaccaatagcagtccagat | 2 N antigen sequence |
| | gaccaaattggctactaccgaagagctaccagacgaattcgtggtggt | based on the Wuhan- |
| | gacggtaagatgaaagatctcagtccaagatggtatttctactacctagg | Hu-1 reference strain |
| | aactgggccagaagctggacttccctatggtgctaacaaagacggcat | (#NC_045512) and |
| | catatgggttgcaactgagggagccttgaatacacctaaagatcacatt | optimized for vaccinia, |
| | ggcacccgcaatcctgctaacaatgctgcaatcgtgctacaacttcctca | which is further |
| | aggaacaacattgcctaaaggcttctacgcagaagggagcagaggc | modified to encode for |
| | ggcagtcaagcctcttctcgttcctcatcacgtagtcgcaacagttcaaga | an N antigen that |
| | aattcaactccaggcagcagtagaggaatctctcctgctagaatggctg | includes mutations of |
| | gcaatggcggtgatgctgctcttgctttgctgctgcttgacagattgaacca | the B.1.351 variant |
| | gcttgagagcaagatgtctggtaaaggccaacaacaacaaggccaa | lineage, including |
| | actgtcactaagaaatctgctgctgaggcttctaagaagcctcggcaga | T2051 |
| | aacgtactgccactaaagcatacaatgtaacacaagctttcggcagac | |
| | gtggtccagaacaaacccaaggaaactttggagaccaggaactaatc | |
| | agacaaggaactgattacaaacattggccgcaaattgcacaatttgctc | |
| | ccagcgcttcagcgttcttcggaatgtcgcgcattggcatggaagtcaca | |
| | ccttcgggaacgtggttgacctacacaggtgccatcaaattggatgaca | |
| | aagatccaaatttcaaagatcaagtcatattgctgaataagcatattgac | |
| | gcatacaagacattcccaccaacagagcctaagaaggacaagaaga | |
| | agaaggctgatgaaactcaagccttaccgcagagacagaagaaaca | |
| | gcaaactgtgactcttcttcctgctgcagatttggatgatttctccaaacaat | |
| | tgcaacaatccatgagcagtgctgactcaactcaggcctaa | |
| 24 | MSDNGPQNQRNAPRITFGGPSDSTGSNQNGERSG | Amino acid sequence |
| | ARSKQRRPQGLPNNTASWFTALTQHGKEDLKFPR | (N- to C-terminus) of a |
| | GQGVPINTNSSPDDQIGYYRRATRRIRGGDGKMKD | codon-optimized |
| | LSPRWYFYYLGTGPEAGLPYGANKDGIIWVATEGA | SARS-CoV-2 N |
| | LNTPKDHIGTRNPANNAAIVLQLPQGTTLPKGFYAE | antigen sequence |
| | GSRGGSQASSRSSSRSRNSSRNSTPGSSRGISPA | based on the Wuhan- |
| | RMAGNGGDAALALLLLDRLNQLESKMSGKGQQQQ | Hu-1 reference strain |
| | GQTVTKKSAAEASKKPRQKRTATKAYNVTQAFGRR | (#NC_045512) and |
| | GPEQTQGNFGDQELIRQGTDYKHWPQIAQFAPSA | optimized for vaccinia, |
| | SAFFGMSRIGMEVTPSGTWLTYTGAIKLDDKDPNF | which is further |
| | KDQVILLNKHIDAYKTFPPTEPKKDKKKKADETQAL | modified to encode for |
| | PQRQKKQQTVTLLPAADLDDFSKQLQQSMSSADS | an N antigen that |
| | TQA | includes mutations of |
| | | the B.1.351 variant |
| | | lineage, including |
| | | T205I |
| 25 | atgtttgtctttcttgtcttattgccactagtctctagtcagtgtgttaatcttaca | Nucleotide |
| | accagaactcaattaccacctgcatacactaattctttcacacgtggtgttt | sequence/ORF (5′ to |
| | attaccctgacaaagtattcagatcctcagtattacattcaactcaggactt | 3′ end) of a codon- |
| | gttcttacctttcttctccaatgttacttggttccatgttatatctgggaccaatg | optimized SARS-CoV- |
| | gtactaagaggtttgataaccctgtcctaccatttaatgatggtgtttatttcg | 2 S antigen sequence |
| | cttccattgagaagtctaacataataagaggctggatatttggtactacttt | based on the Wuhan- |
| | agattcgaagacccagtccctacttattgttaataacgctactaatgttgtta | Hu-1 reference strain |
| | ttaaagtctgtgaatttcaattctgtaatgatccattcttggatcacaagaac | (#NC_045512) and |
| | aacaagagttggatggaaagtgagttcagagtttattctagtgcgaataa | optimized for vaccinia, |
| | ttgcactttcgaatatgtctctcagcctttccttatggaccttgaaggtaaac | which is further |
| | agggtaatttcaagaatcttagggaatttgtgtttaagaatattgatggttatt | modified to encode for |
| | tcaagatatattctaagcacacgcctattatagtgcgtgaacctgaagatc | an S antigen that |
| | tccctcagggtttctcggctttagaaccattggtagatttgccaataggtatt | includes mutations of |
| | aacatcactaggtttcaaactttacttgctttacatagaagttatttgactcct | the B.1.1.529/BA.1 |
| | ggtgattcttcttcaggttggacagctggtgctgcagcttattatgtgggttat | variant lineage, |
| | cttcaacctaggactttcctattgaaatataatgagaatggaaccattaca | including A67V, |
| | gatgctgtagactgtgcacttgaccctctctcagaaacaaagtgtacgttg | Del69-70 (HV), T95I, |
| | aaatccttcactgtagagaaaggaatctatcaaacttctaactttagagtc | G142D, Del143-145 |
| | caaccaacagaatctattgttagatttcctaatattacaaacttgtgcccttt | (VYY), Del211 (N), |
| | cgacgaagtatttaacgccaccagatttgcatctgtttatgcttggaacag | L212I, Ins214 (EPE), |
| | gaagagaatcagcaactgtgttgctgattattctgtcctatataatctcgca | G339D, S371L, |
| | ccattcttcacatttaagtgttatggagtgtctcctactaaattaaatgatctct | S373P, S375F, |
| | gctttactaatgtctatgcagattcatttgtaattagaggtgatgaagtcag | K417N, N440K, |
| | acaaatcgctccagggcaaactggaaatattgctgattataattataaatt | G446S, S477N, |
| | accagatgactttacaggctgcgttatagcttggaattctaacaaacttga | T478K, E484A, |
| | ttctaaggttagtggtaattataattacctgtatagattgtttaggaagtctaa | Q493R, G496S, |
| | tctcaaacctttcgagagagatatttcaactgaaatctatcaggccggtaa | Q498R, N501Y, |
| | caaaccttgtaatggtgttgcaggatttaattgttactttcctttacgatcatat | Y505H, T547K, |
| | agtttccgacccacttatggtgttggtcaccaaccatacagagtagtagta | D614G, H655Y, |
| | ctttcatttgaacttctacatgcaccagcaactgtttgtggacctaagaagt | N679K, P681H, |
| | ctactaatttggttaagaacaaatgtgtcaatttcaacttcaatggtttgaaa | N764K, D796Y, |
| | ggcacaggtgttcttactgagtctaacaagaagtttctgcctttccaacaat | N856K, Q954H, |
| | ttggcagagacattgctgacactactgatgctgtccgtgatccacagaca | N969K, and L981F |
| | cttgagattcttgacattacaccatgttcatttggtggtgtcagtgttataaca | |
| | ccaggaacaaatacttctaaccaggttgctgttctttatcagggtgttaact | |
| | gcacagaagtccctgttgctattcatgcagatcaacttactcctacttggc | |
| | gtgtttattctacaggttctaatgtatttcaaacacgtgcaggctgtttaatag | |
| | gagctgaatatgtcaacaactcatatgagtgtgacatacccattggtgca | |
| | ggtatatgcgctagttatcagactcagactaagtctcatcggcgggcacg | |
| | tagtgtagctagtcaatccatcattgcctacactatgtcacttggtgcagag | |
| | aattcagttgcttactctaataactctattgccatacccacaaactttactatt | |
| | agtgttaccacagaaattctaccagtgtctatgaccaagacatcagtag | |
| | attgtacaatgtacatttgtggtgattcaactgaatgcagcaatctattgttg | |
| | caatatggcagtttctgtacacaattaaagcgtgctttaactggaatagct | |
| | gttgaacaagacaagaacacccaagaagtatttgcacaagtcaaaca | |
| | aatttacaagacaccaccaattaagtatttcggtggatttaatttctcacaa | |
| | atattaccagatccatctaaaccaagcaagaggtcatttattgaagatct | |
| | actattcaacaaagtgacacttgcagatgctggcttcatcaaacaatatg | |
| | gtgattgccttggtgatattgctgctagagacctcatttgtgcacagaagttt | |
| | aagggccttactgtattgccacctttgctcacagatgaaatgattgctcaat | |
| | acacttctgcactgttagcgggtacaatcacttctggttggacctttggtgc | |
| | aggtgctgcattacaaataccatttgctatgcaaatggcttataggtttaat | |
| | ggtattggagttacacagaatgttctctatgagaaccagaaattgattgcc | |
| | aaccaatttaatagtgctattggcaagattcaagactcactttcttccacag | |
| | caagtgcacttggtaaacttcaagatgtggtcaaccacaatgcacaagc | |
| | tttaaacacgcttgttaaacaacttagctccaagtttggtgcaatttcaagt | |
| | gtattaaatgatatcttctcacgtcttgacaaagttgaggctgaagtgcaa | |
| | attgataggttgatcacaggcagacttcaaagtttgcagacatatgtgact | |
| | caacaattaattagagctgcagaaatcagagcttctgctaatcttgctgct | |
| | actaagatgtcagagtgtgtacttggacaatctaagagagttgatttctgt | |
| | ggaaagggctatcatcttatgtccttccctcagtcagcacctcatggtgta | |
| | gtcttcttgcatgtgacttatgtccctgcacaagagaagaacttcacaact | |
| | gctcctgccatttgtcatgatggtaaagcacactttcctcgtgaaggtgtctt | |
| | tgtttcaaatggcacacactggtttgtaacacaaaggaatttctatgaacc | |
| | acaaatcattactacagacaacacatttgtgtctggtaactgtgatgttgta | |
| | ataggaattgtcaacaacacagtttatgatcctttgcaacctgaattagac | |
| | tcattcaaggaggagttagataaatatttcaagaatcatacatcaccaga | |
| | tgttgatttaggtgacatctctggcattaatgcttcagttgtaaacattcaga | |
| | aagaaattgaccgcctcaatgaggttgccaagaatttaaatgaatctctc | |
| | atcgatctccaagaacttggaaagtatgagcagtatatcaaatggccat | |
| | ggtacatttggctaggtttcatagctggcttgattgccatagtaatggtgac | |
| | aattatgctttgctgtatgaccagttgctgtagttgtctcaagggctgttgttct | |
| | tgtggatcctgctgcaaatttgatgaagacgactctgagccagtgctcaa | |
| | aggagtcaaattacattacacataa | |
| 26 | MFVFLVLLPLVSSQCVNLTTRTQLPPAYTNSFTRGV | Amino acid sequence |
| | YYPDKVFRSSVLHSTQDLFLPFFSNVTWFHVISGTN | (N- to C-terminus) of a |
| | GTKRFDNPVLPFNDGVYFASIEKSNIIRGWIFGTTLD | codon-optimized |
| | SKTQSLLIVNNATNVVIKVCEFQFCNDPFLDHKNNK | SARS-CoV-2 S |
| | SWMESEFRVYSSANNCTFEYVSQPFLMDLEGKQG | antigen sequence |
| | NFKNLREFVFKNIDGYFKIYSKHTPIIVREPEDLPQG | based on the Wuhan- |
| | FSALEPLVDLPIGINITRFQTLLALHRSYLTPGDSSS | Hu-1 reference strain |
| | GWTAGAAAYYVGYLQPRTFLLKYNENGTITDAVDC | (#NC_045512) and |
| | ALDPLSETKCTLKSFTVEKGIYQTSNFRVQPTESIVR | optimized for vaccinia, |
| | FPNITNLCPFDEVFNATRFASVYAWNRKRISNCVAD | which is further |
| | YSVLYNLAPFFTFKCYGVSPTKLNDLCFTNVYADSF | modified to encode for |
| | VIRGDEVRQIAPGQTGNIADYNYKLPDDFTGCVIAW | an S antigen that |
| | NSNKLDSKVSGNYNYLYRLFRKSNLKPFERDISTEI | includes mutations of |
| | YQAGNKPCNGVAGFNCYFPLRSYSFRPTYGVGHQ | the B.1.1.529/BA.1 |
| | PYRVVVLSFELLHAPATVCGPKKSTNLVKNKCVNF | variant lineage, |
| | NFNGLKGTGVLTESNKKFLPFQQFGRDIADTTDAV | including A67V, |
| | RDPQTLEILDITPCSFGGVSVITPGTNTSNQVAVLYQ | Del69-70 (HV), T951, |
| | GVNCTEVPVAIHADQLTPTWRVYSTGSNVFQTRAG | G142D, Del143-145 |
| | CLIGAEYVNNSYECDIPIGAGICASYQTQTKSHRRA | (VYY), Del211 (N), |
| | RSVASQSIIAYTMSLGAENSVAYSNNSIAIPTNFTISV | L212I, Ins214 (EPE), |
| | TTEILPVSMTKTSVDCTMYICGDSTECSNLLLQYGS | G339D, S371L, |
| | FCTQLKRALTGIAVEQDKNTQEVFAQVKQIYKTPPIK | S373P, S375F, |
| | YFGGFNFSQILPDPSKPSKRSFIEDLLFNKVTLADA | K417N, N440K, |
| | GFIKQYGDCLGDIAARDLICAQKFKGLTVLPPLLTDE | G446S, S477N, |
| | MIAQYTSALLAGTITSGWTFGAGAALQIPFAMQMAY | T478K, E484A, |
| | RFNGIGVTQNVLYENQKLIANQFNSAIGKIQDSLSST | Q493R, G496S, |
| | ASALGKLQDVVNHNAQALNTLVKQLSSKFGAISSVL | Q498R, N501Y, |
| | NDIFSRLDKVEAEVQIDRLITGRLQSLQTYVTQQLIR | Y505H, T547K, |
| | AAEIRASANLAATKMSECVLGQSKRVDFCGKGYHL | D614G, H655Y, |
| | MSFPQSAPHGVVFLHVTYVPAQEKNFTTAPAICHD | N679K, P681H, |
| | GKAHFPREGVFVSNGTHWFVTQRNFYEPQIITTDN | N764K, D796Y, |
| | TFVSGNCDVVIGIVNNTVYDPLQPELDSFKEELDKY | N856K, Q954H, |
| | FKNHTSPDVDLGDISGINASVVNIQKEIDRLNEVAKN | N969K, and L981F |
| | LNESLIDLQELGKYEQYIKWPWYIWLGFIAGLIAIVM | |
| | VTIMLCCMTSCCSCLKGCCSCGSCCKFDEDDSEPV | |
| | LKGVKLHYT | |
| 27 | atgtctgataacggaccacagaatcagcgaaacgcactacgcattacg | Nucleotide |
| | tttggtggaccctcagattcaactggcagtaaccagaatggaggagcg | sequence/ORF (5′ to |
| | cgatctaaacaacgtcggcctcaaggtttacccaataatactgcgtcttg | 3′ end) of a codon- |
| | gttcaccgctctcactcaacatggcaaggaagaccttaaattccctcgag | optimized SARS-CoV- |
| | gacaaggcgttccaattaacaccaatagcagtccagatgaccaaattg | 2 N antigen sequence |
| | gctactaccgaagagctaccagacgaattcgtggtggtgacggtaaga | based on the Wuhan- |
| | tgaaagatctcagtccaagatggtatttctactacctaggaactgggcca | Hu-1 reference strain |
| | gaagctggacttccctatggtgctaacaaagacggcatcatatgggttg | (#NC_045512) and |
| | caactgagggagccttgaatacacctaaagatcacattggcacccgca | optimized for vaccinia, |
| | atcctgctaacaatgctgcaatcgtgctacaacttcctcaaggaacaac | which is further |
| | attgcctaaaggcttctacgcagaagggagcagaggcggcagtcaag | modified to encode for |
| | cctcttctcgttcctcatcacgtagtcgcaacagttcaagaaattcaactcc | an N antigen that |
| | aggcagcagtaaacgaacttctcctgctagaatggctggcaatggcgg | includes mutations of |
| | tgatgctgctcttgctttgctgctgcttgacagattgaaccagcttgagagc | the B.1.1.529/BA. 1 |
| | aagatgtctggtaaaggccaacaacaacaaggccaaactgtcactaa | variant lineage, |
| | gaaatctgctgctgaggcttctaagaagcctcggcagaaacgtactgcc | including P13L, |
| | actaaagcatacaatgtaacacaagctttcggcagacgtggtccagaa | Del31-33 (ERS), |
| | caaacccaaggaaactttggagaccaggaactaatcagacaaggaa | R203K, G204R |
| | ctgattacaaacattggccgcaaattgcacaatttgctcccagcgcttca | |
| | gcgttcttcggaatgtcgcgcattggcatggaagtcacaccttcgggaac | |
| | gtggttgacctacacaggtgccatcaaattggatgacaaagatccaaat | |
| | ttcaaagatcaagtcatattgctgaataagcatattgacgcatacaagac | |
| | attcccaccaacagagcctaagaaggacaagaagaagaaggctgat | |
| | gaaactcaagccttaccgcagagacagaagaaacagcaaactgtga | |
| | ctcttcttcctgctgcagatttggatgatttctccaaacaattgcaacaatcc | |
| | atgagcagtgctgactcaactcaggcctaa | |
| 28 | MSDNGPQNQRNALRITFGGPSDSTGSNQNGGARS | Amino acid sequence |
| | KQRRPQGLPNNTASWFTALTQHGKEDLKFPRGQG | (N- to C-terminus) of a |
| | VPINTNSSPDDQIGYYRRATRRIRGGDGKMKDLSP | codon-optimized |
| | RWYFYYLGTGPEAGLPYGANKDGIIWVATEGALNT | SARS-CoV-2 N |
| | PKDHIGTRNPANNAAIVLQLPQGTTLPKGFYAEGSR | antigen sequence |
| | GGSQASSRSSSRSRNSSRNSTPGSSKRTSPARMA | based on the Wuhan- |
| | GNGGDAALALLLLDRLNQLESKMSGKGQQQQGQT | Hu-1 reference strain |
| | VTKKSAAEASKKPRQKRTATKAYNVTQAFGRRGPE | (#NC_045512) and |
| | QTQGNFGDQELIRQGTDYKHWPQIAQFAPSASAFF | optimized for vaccinia, |
| | GMSRIGMEVTPSGTWLTYTGAIKLDDKDPNFKDQVI | which is further |
| | LLNKHIDAYKTFPPTEPKKDKKKKADETQALPQRQK | modified to encode for |
| | KQQTVTLLPAADLDDFSKQLQQSMSSADSTQA | an N antigen that |
| | | includes mutations of |
| | | the B.1.1.529/BA.1 |
| | | variant lineage, |
| | | including P13L, |
| | | Del31-33 (ERS), |
| | | R203K, G204R |
| 29 | atgtttgtctttcttgtcttattgccactagtctctagtcagtgtgttaactttaca | Nucleotide |
| | aacagaactcaattaccatctgcatacactaattctttcacacgtggtgttt | sequence/ORF (5′ to |
| | attaccctgacaaagtattcagatcctcagtattacattcaactcaggactt | 3′ end) of a codon- |
| | gttcttacctttcttctccaatgttacttggttccatgctatacatgtctctggga | optimized SARS-CoV- |
| | ccaatggtactaagaggtttgataaccctgtcctaccatttaatgatggtgt | 2 S antigen sequence |
| | ttatttcgcttccactgagaagtctaacataataagaggctggatatttggt | based on the Wuhan- |
| | actactttagattcgaagacccagtccctacttattgttaataacgctacta | Hu-1 reference strain |
| | atgttgttattaaagtctgtgaatttcaattctgtaattatccattcttgggtgttt | (#NC_045512) and |
| | attaccacaagaacaacaagagttggatggaaagtgagttcagagttt | optimized for vaccinia, |
| | attctagtgcgaataattgcactttcgaatatgtctctcagcctttccttatgg | which is further |
| | accttgaaggtaaacagggtaatttcaagaatcttagcgaatttgtgttta | modified to encode for |
| | agaatattgatggttatttcaagatatattctaagcacacgcctattaattta | an S antigen that |
| | gtgcgtgatctccctcagggtttctcggctttagaaccattggtagatttgcc | includes mutations of |
| | aataggtattaacatcactaggtttcaaactttacttgctttacatagaagtt | the P.1 variant |
| | atttgactcctggtgattcttcttcaggttggacagctggtgctgcagcttatt | lineage, including |
| | atgtgggttatcttcaacctaggactttcctattgaaatataatgagaatgg | L18F, T20N, P26S, |
| | aaccattacagatgctgtagactgtgcacttgaccctctctcagaaacaa | D138Y, R190S, |
| | agtgtacgttgaaatccttcactgtagagaaaggaatctatcaaacttcta | K417T, E484K, |
| | actttagagtccaaccaacagaatctattgttagatttcctaatattacaaa | N501Y, D614G, |
| | cttgtgccctttcggtgaagtatttaacgccaccagatttgcatctgtttatgc | H655Y, T1027I, and |
| | ttggaacaggaagagaatcagcaactgtgttgctgattattctgtcctatat | V1167F |
| | aattccgcatcattctccacatttaagtgttatggagtgtctcctactaaatta | |
| | aatgatctctgctttactaatgtctatgcagattcatttgtaattagaggtgat | |
| | gaagtcagacaaatcgctccagggcaaactggaacgattgctgattat | |
| | aattataaattaccagatgactttacaggctgcgttatagcttggaattcta | |
| | acaatcttgattctaaggttggtggtaattataattacctgtatagattgttta | |
| | ggaagtctaatctcaaacctttcgagagagatatttcaactgaaatctatc | |
| | aggccggtagcacaccttgtaatggtgttaaaggatttaattgttactttcct | |
| | ttacaatcatatggtttccaacccacttatggtgttggttaccaaccataca | |
| | gagtagtagtactttcatttgaacttctacatgcaccagcaactgtttgtgg | |
| | acctaagaagtctactaatttggttaagaacaaatgtgtcaatttcaacttc | |
| | aatggtttaacaggcacaggtgttcttactgagtctaacaagaagtttctg | |
| | cctttccaacaatttggcagagacattgctgacactactgatgctgtccgt | |
| | gatccacagacacttgagattcttgacattacaccatgttcatttggtggtgt | |
| | cagtgttataacaccaggaacaaatacttctaaccaggttgctgttctttat | |
| | cagggtgttaactgcacagaagtccctgttgctattcatgcagatcaactt | |
| | actcctacttggcgtgtttattctacaggttctaatgtatttcaaacacgtgca | |
| | ggctgtttaataggagctgaatatgtcaacaactcatatgagtgtgacata | |
| | cccattggtgcaggtatatgcgctagttatcagactcagactaattctcctc | |
| | ggcgggcacgtagtgtagctagtcaatccatcattgcctacactatgtca | |
| | cttggtgcagagaattcagttgcttactctaataactctattgccataccca | |
| | caaactttactattagtgttaccacagaaattctaccagtgtctatgaccaa | |
| | gacatcagtagattgtacaatgtacatttgtggtgattcaactgaatgcag | |
| | caatctattgttgcaatatggcagtttctgtacacaattaaaccgtgctttaa | |
| | ctggaatagctgttgaacaagacaagaacacccaagaagtatttgcac | |
| | aagtcaaacaaatttacaagacaccaccaattaaagatttcggtggattt | |
| | aatttctcacaaatattaccagatccatctaaaccaagcaagaggtcattt | |
| | attgaagatctactattcaacaaagtgacacttgcagatgctggcttcatc | |
| | aaacaatatggtgattgccttggtgatattgctgctagagacctcatttgtg | |
| | cacagaagtttaacggccttactgtattgccacctttgctcacagatgaaa | |
| | tgattgctcaatacacttctgcactgttagcgggtacaatcacttctggttgg | |
| | acctttggtgcaggtgctgcattacaaataccatttgctatgcaaatggctt | |
| | ataggtttaatggtattggagttacacagaatgttctctatgagaaccaga | |
| | aattgattgccaaccaatttaatagtgctattggcaagattcaagactcac | |
| | tttcttccacagcaagtgcacttggtaaacttcaagatgtggtcaaccaga | |
| | atgcacaagctttaaacacgcttgttaaacaacttagctccaactttggtg | |
| | caatttcaagtgtattaaatgatatcctttcacgtcttgacaaagttgaggct | |
| | gaagtgcaaattgataggttgatcacaggcagacttcaaagtttgcaga | |
| | catatgtgactcaacaattaattagagctgcagaaatcagagcttctgct | |
| | aatcttgctgctattaagatgtcagagtgtgtacttggacaatctaagaga | |
| | gttgatttctgtggaaagggctatcatcttatgtccttccctcagtcagcacc | |
| | tcatggtgtagtcttcttgcatgtgacttatgtccctgcacaagagaagaac | |
| | ttcacaactgctcctgccatttgtcatgatggtaaagcacactttcctcgtg | |
| | aaggtgtctttgtttcaaatggcacacactggtttgtaacacaaaggaattt | |
| | ctatgaaccacaaatcattactacagacaacacatttgtgtctggtaactg | |
| | tgatgttgtaataggaattgtcaacaacacagtttatgatcctttgcaacct | |
| | gaattagactcattcaaggaggagttagataaatatttcaagaatcatac | |
| | atcaccagatgttgatttaggtgacatctctggcattaatgcttcatttgtaa | |
| | acattcagaaagaaattgaccgcctcaatgaggttgccaagaatttaaa | |
| | tgaatctctcatcgatctccaagaacttggaaagtatgagcagtatatca | |
| | aatggccatggtacatttggctaggtttcatagctggcttgattgccatagt | |
| | aatggtgacaattatgctttgctgtatgaccagttgctgtagttgtctcaagg | |
| | gctgttgttcttgtggatcctgctgcaaatttgatgaagacgactctgagcc | |
| | agtgctcaaaggagtcaaattacattacacataa | |
| 30 | MFVFLVLLPLVSSQCVNFTNRTQLPSAYTNSFTRGV | Amino acid sequence |
| | YYPDKVFRSSVLHSTQDLFLPFFSNVTWFHAIHVSG | (N- to C-terminus) of a |
| | TNGTKRFDNPVLPFNDGVYFASTEKSNIIRGWIFGT | codon-optimized |
| | TLDSKTQSLLIVNNATNVVIKVCEFQFCNYPFLGVYY | SARS-CoV-2 S |
| | HKNNKSWMESEFRVYSSANNCTFEYVSQPFLMDL | antigen sequence |
| | EGKQGNFKNLSEFVFKNIDGYFKIYSKHTPINLVRDL | based on the Wuhan- |
| | PQGFSALEPLVDLPIGINITRFQTLLALHRSYLTPGD | Hu-1 reference strain |
| | SSSGWTAGAAAYYVGYLQPRTFLLKYNENGTITDA | (#NC_045512) and |
| | VDCALDPLSETKCTLKSFTVEKGIYQTSNFRVQPTE | optimized for vaccinia, |
| | SIVRFPNITNLCPFGEVFNATRFASVYAWNRKRISN | which is further |
| | CVADYSVLYNSASFSTFKCYGVSPTKLNDLCFTNV | modified to encode for |
| | YADSFVIRGDEVRQIAPGQTGTIADYNYKLPDDFTG | an S antigen that |
| | CVIAWNSNNLDSKVGGNYNYLYRLFRKSNLKPFER | includes mutations of |
| | DISTEIYQAGSTPCNGVKGFNCYFPLQSYGFQPTY | the P.1 variant |
| | GVGYQPYRVVVLSFELLHAPATVCGPKKSTNLVKN | lineage, including |
| | KCVNFNFNGLTGTGVLTESNKKFLPFQQFGRDIAD | L18F, T20N, P26S, |
| | TTDAVRDPQTLEILDITPCSFGGVSVITPGTNTSNQV | D138Y, R190S, |
| | AVLYQGVNCTEVPVAIHADQLTPTWRVYSTGSNVF | K417T, E484K, |
| | QTRAGCLIGAEYVNNSYECDIPIGAGICASYQTQTN | N501Y, D614G, |
| | SPRRARSVASQSIIAYTMSLGAENSVAYSNNSIAIPT | H655Y, T1027I and |
| | NFTISVTTEILPVSMTKTSVDCTMYICGDSTECSNLL | V1167F |
| | LQYGSFCTQLNRALTGIAVEQDKNTQEVFAQVKQIY | |
| | KTPPIKDFGGFNFSQILPDPSKPSKRSFIEDLLFNKV | |
| | TLADAGFIKQYGDCLGDIAARDLICAQKFNGLTVLPP | |
| | LLTDEMIAQYTSALLAGTITSGWTFGAGAALQIPFA | |
| | MQMAYRFNGIGVTQNVLYENQKLIANQFNSAIGKIQ | |
| | DSLSSTASALGKLQDVVNQNAQALNTLVKQLSSNF | |
| | GAISSVLNDILSRLDKVEAEVQIDRLITGRLQSLQTY | |
| | VTQQLIRAAEIRASANLAAIKMSECVLGQSKRVDFC | |
| | GKGYHLMSFPQSAPHGVVFLHVTYVPAQEKNFTTA | |
| | PAICHDGKAHFPREGVFVSNGTHWFVTQRNFYEP | |
| | QIITTDNTFVSGNCDVVIGIVNNTVYDPLQPELDSFK | |
| | EELDKYFKNHTSPDVDLGDISGINASFVNIQKEIDRL | |
| | NEVAKNLNESLIDLQELGKYEQYIKWPWYIWLGFIA | |
| | GLIAIVMVTIMLCCMTSCCSCLKGCCSCGSCCKFDE | |
| | DDSEPVLKGVKLHYT | |
| 31 | atgtctgataacggaccacagaatcagcgaaacgcaccacgcattac | Nucleotide |
| | gtttggtggaccctcagattcaactggcagtaaccagaatggagaacg | sequence/ORF (5′ to |
| | cagtggagcgcgatctaaacaacgtcggcctcaaggtttacccaataat | 3′ end) of a codon- |
| | actgcgtcttggttcaccgctctcactcaacatggcaaggaagaccttaa | optimized SARS-CoV- |
| | attccctcgaggacaaggcgttccaattaacaccaatagcagtcgagat | 2 N antigen sequence |
| | gaccaaattggctactaccgaagagctaccagacgaattcgtggtggt | based on the Wuhan- |
| | gacggtaagatgaaagatctcagtccaagatggtatttctactacctagg | Hu-1 reference strain |
| | aactgggccagaagctggacttccctatggtgctaacaaagacggcat | (#NC_045512) and |
| | catatgggttgcaactgagggagccttgaatacacctaaagatcacatt | optimized for vaccinia, |
| | ggcacccgcaatcctgctaacaatgctgcaatcgtgctacaacttcctca | which is further |
| | aggaacaacattgcctaaaggcttctacgcagaagggagcagaggc | modified to encode for |
| | ggcagtcaagcctcttctcgttcctcatcacgtagtcgcaacagttcaaga | an N antigen that |
| | aattcaactccaggcagcagtaaacgaacttctcctgctagaatggctg | includes mutations of |
| | gcaatggcggtgatgctgctcttgctttgctgctgcttgacagattgaacca | the P.1 variant |
| | gcttgagagcaagatgtctggtaaaggccaacaacaacaaggccaa | lineage, including |
| | actgtcactaagaaatctgctgctgaggcttctaagaagcctcggcaga | P80R, R203K, and |
| | aacgtactgccactaaagcatacaatgtaacacaagctttcggcagac | G204K |
| | gtggtccagaacaaacccaaggaaactttggagaccaggaactaatc | |
| | agacaaggaactgattacaaacattggccgcaaattgcacaatttgctc | |
| | ccagcgcttcagcgttcttcggaatgtcgcgcattggcatggaagtcaca | |
| | ccttcgggaacgtggttgacctacacaggtgccatcaaattggatgaca | |
| | aagatccaaatttcaaagatcaagtcatattgctgaataagcatattgac | |
| | gcatacaagacattcccaccaacagagcctaagaaggacaagaaga | |
| | agaaggctgatgaaactcaagccttaccgcagagacagaagaaaca | |
| | gcaaactgtgactcttcttcctgctgcagatttggatgatttctccaaacaat | |
| | tgcaacaatccatgagcagtgctgactcaactcaggcctaa | |
| 32 | MSDNGPQNQRNAPRITFGGPSDSTGSNQNGERSG | Amino acid sequence |
| | ARSKQRRPQGLPNNTASWFTALTQHGKEDLKFPR | (N- to C-terminus) of a |
| | GQGVPINTNSSRDDQIGYYRRATRRIRGGDGKMKD | codon-optimized |
| | LSPRWYFYYLGTGPEAGLPYGANKDGIIWVATEGA | SARS-CoV-2 N |
| | LNTPKDHIGTRNPANNAAIVLQLPQGTTLPKGFYAE | antigen sequence |
| | GSRGGSQASSRSSSRSRNSSRNSTPGSSKRTSPA | based on the Wuhan- |
| | RMAGNGGDAALALLLLDRLNQLESKMSGKGQQQQ | Hu-1 reference strain |
| | GQTVTKKSAAEASKKPRQKRTATKAYNVTQAFGRR | (#NC_045512) and |
| | GPEQTQGNFGDQELIRQGTDYKHWPQIAQFAPSA | optimized for vaccinia, |
| | SAFFGMSRIGMEVTPSGTWLTYTGAIKLDDKDPNF | which is further |
| | KDQVILLNKHIDAYKTFPPTEPKKDKKKKADETQAL | modified to encode for |
| | PQRQKKQQTVTLLPAADLDDFSKQLQQSMSSADS | an N antigen that |
| | TQA | includes mutations of |
| | | the P.1 variant |
| | | lineage, including |
| | | P80R, R203K, and |
| | | G204K |

[0083] In some embodiments, the DNA sequence encoding the S protein is based on the Wuhan-Hu-1 reference strain or is derived from a variant of concern (VOC). In some embodiments, the DNA sequence encoding the N protein is based on the Wuhan-Hu-1 reference strain or is derived from a VOC. In some embodiments, the VOC is selected from the group consisting of B.1.1.7 (Alpha), B.1.351 (Beta), P.1 (Gamma), B.1.617.2 (Delta), B.1.621 (Mu), 0.37 (Lambda), C.1.2, BA.1 (Omicron), BA.2 (Omicron), BA.2.12.1 (Omicron), BA.4 (Omicron), BA.5 (Omicron), BA.2.75 (Omicron), BQ.1 (Omicron), BQ.1.1 (Omicron), and XBB (Omicron).

[0084] In some embodiments, the DNA sequence encoding the S protein comprises a nucleotide sequence that is at least 80% identical to any one of SEQ ID NOs: 5, 9, 11, 13, 15, 21, 25, and 29. In some embodiments, the DNA sequence encoding the N protein comprises a nucleotide sequence that is at least 80% identical to any one of SEQ ID NOs: 7, 17, 19, 23, 27, and 31.

[0085] In some embodiments, the DNA sequences encode an S protein and an N protein based on the ancestral Wuhan-Hu-1 reference strain. In certain of these embodiments, the DNA sequences comprise or consist of nucleotide sequences set forth in SEQ ID NOs: 5 and 7, respectively, or nucleotide sequences that are at least about 80% identical (e.g., at least about 80%, at least about 85%, at least about 90%, at least about 95%, at least about 96%, at least about 97%, at least about 98%, at least about 99%, or about 100% identical) to the nucleotide sequences set forth in SEQ ID NOs: 5 and 7, respectively. The corresponding S protein and N protein encoded by the]DNA sequences comprise or consist of amino acid sequences set forth in SEQ ID NOs: 6 and 8, respectively, or amino acid sequences that are at least about 80% identical (e.g., at least about 80%, at least about 85%, at least about 90%, at least about 95%, at least about 96%, at least about 97%, at least about 98%, at least about 99%, or about 100% identical) to the amino acid sequences set forth in SEQ ID NOs: 6 and 8, respectively.

[0086] In some embodiments, the DNA sequences encode an S protein and an N protein based on the B.1.351 (Beta) strain. In certain of these embodiments, the DNA sequences comprise or consist of nucleotide sequences set forth in SEQ ID NOs: 21 and 23, respectively, or nucleotide sequences that are at least about 80% identical (e.g., at least about 80%, at least about 85%, at least about 90%, at least about 95%, at least about 96%, at least about 97%, at least about 98%, at least about 99%, or about 100% identical) to the nucleotide sequences set forth in SEQ ID NOs: 21 and 23, respectively. The corresponding S protein and N protein encoded by the DNA sequences comprise or consist of amino acid sequences set forth in SEQ ID NOs: 22 and 24, respectively, or amino acid sequences that are at least about 80% identical (e.g., at least about 80%, at least about 85%, at least about 90%, at least about 95%, at least about 96%, at least about 97%, at least about 98%, at least about 99%, or about 100% identical) to the amino acid sequences set forth in SEQ ID NOs: 22 and 24, respectively.

[0087] In some embodiments, the DNA sequences encode an S protein and an N protein based on the P.1 (Gamma) strain. In certain of these embodiments, the DNA sequences comprise or consist of nucleotide sequences set forth in SEQ ID NOs: 29 and 3′, respectively, or nucleotide sequences that are at least about 80% identical (e.g., at least about 80%, at least about 85%, at least about 90%, at least about 95%, at least about 96%, at least about 97%, at least about 98%, at least about 99%, or about 100% identical) to the nucleotide sequences set forth in SEQ ID NOs: 29 and 31, respectively. The corresponding S protein and N protein encoded by the DNA sequences comprise or consist of amino acid sequences set forth in SEQ ID NOs: 30 and 32, respectively, or amino acid sequences that are at least about 80% identical (e.g., at least about 80%, at least about 85%, at least about 90%, at least about 95%, at least about 96%, at least about 97%, at least about 98%, at least about 99%, or about 100% identical) to the amino acid sequences set forth in SEQ ID NOs: 30 and 32, respectively.

[0088] In some embodiments, the DNA sequences encode an S protein and an N protein based on the B.1.617.2 (Delta) strain. In certain of these embodiments, the DNA sequences comprise or consist of nucleotide sequences set forth in SEQ ID NOs: 9 and 17, respectively, or nucleotide sequences that are at least about 80% identical (e.g., at least about 80%, at least about 85%, at least about 90%, at least about 95%, at least about 96%, at least about 97%, at least about 98%, at least about 99%, or about 100% identical) to the nucleotide sequences set forth in SEQ ID NOs: 9 and 17, respectively. The corresponding S protein and N protein encoded by the DNA sequences comprise or consist of amino acid sequences set forth in SEQ ID NOs: 10 and 18, respectively, or amino acid sequences that are at least about 80% identical (e.g., at least about 80%, at least about 85%, at least about 90%, at least about 95%, at least about 96%, at least about 97%, at least about 98%, at least about 99%, or about 100% identical) to the amino acid sequences set forth in SEQ ID NOs: 10 and 18, respectively.

[0089] In some embodiments, the DNA sequences encode an S protein and an N protein based on the B.1.617.2 (Delta) strain. In certain of these embodiments, the DNA sequences comprise or consist of nucleotide sequences set forth in SEQ ID NOs: 11 and 17, respectively, or nucleotide sequences that are at least about 80% identical (e.g., at least about 80%, at least about 85%, at least about 90%, at least about 95%, at least about 96%, at least about 97%, at least about 98%, at least about 99%, or about 100% identical) to the nucleotide sequences set forth in SEQ ID NOs: 11 and 17, respectively. The corresponding S protein and N protein encoded by the hDNA sequences comprise or consist of amino acid sequences set forth in SEQ ID NOs: 12 and 18, respectively, or amino acid sequences that are at least about 80% identical (e.g., at least about 80%, at least about 85%, at least about 90%, at least about 95%, at least about 96%, at least about 97%, at least about 98%, at least about 99%, or about 100% identical) to the amino acid sequences set forth in SEQ ID NOs: 12 and 18, respectively.

[0090] In some embodiments, the DNA sequences encode an S protein and an N protein based on the C.1.2 strain. In certain of these embodiments, the DNA sequences comprise or consist of nucleotide sequences set forth in SEQ ID NOs: 15 and 19, respectively, or nucleotide sequences that are at least about 80% identical (e.g., at least about 80%, at least about 85%, at least about 90%, at least about 95%, at least about 96%, at least about 97%, at least about 98%, at least about 99%, or about 100% identical) to the nucleotide sequences set forth in SEQ ID NOs: 15 and 19, respectively. The corresponding S protein and N protein encoded by the DNA sequences comprise or consist of amino acid sequences set forth in SEQ ID NOs: 16 and 20, respectively, or amino acid sequences that are at least about 80% identical (e.g., at least about 80%, at least about 85%, at least about 90%, at least about 95%, at least about 96%, at least about 97%, at least about 98%, at least about 99%, or about 100% identical) to the amino acid sequences set forth in SEQ ID NOs: 16 and 20, respectively.

[0091] In some embodiments, the DNA sequences encode an S protein and an N protein based on the B.1.1.529/BA.1 (Omicron) strain. In certain of these embodiments, the DNA sequences comprise or consist of nucleotide sequences set forth in SEQ ID NOs: 25 and 27, respectively, or nucleotide sequences that are at least about 80% identical (e.g., at least about 80%, at least about 85%, at least about 90%, at least about 95%, at least about 96%, at least about 97%, at least about 98%, at least about 99%, or about 100% identical) to the nucleotide sequences set forth in SEQ ID NOs: 25 and 27, respectively. The corresponding S protein and N protein encoded by the DNA sequences comprise or consist of amino acid sequences set forth in SEQ ID NOs: 26 and 28, respectively, or amino acid sequences that are at least about 80% identical (e.g., at least about 80%, at least about 85%, at least about 90%, at least about 95%, at least about 96%, at least about 97%, at least about 98%, at least about 99%, or about 100% identical) to the amino acid sequences set forth in SEQ ID NOs: 26 and 28, respectively.

[0092] In some embodiments, the SARS-CoV-2 comprises the Wuhan-Hu-1 reference strain or a VOC. In some embodiments, the VOC is selected from the group consisting of B.1.1.7 (Alpha), B.1.351 (Beta), P.1 (Gamma), B.1.617.2 (Delta), B.1.621 (Mu), C.37 (Lambda), C.1.2, BA.1 (Omicron), BA.2 (Omicron), BA.2.12.1 (Omicron), BA.4 (Omicron), BA.5 (Omicron), BA.2.75 (Omicron), BQ.1 (Omicron), BQ.1.1 (Omicron), and XBB (Omicron).

[0093] In some embodiments, the vaccines and/or immunogenic compositions comprise one or more sMVA vectors, wherein the one or more sMVA vectors comprise one or more heterologous DNA sequences encoding the S protein and/or N protein of the SARS-CoV-2 Wuhan-Hu-1 reference stain. In some embodiments, the one or more sMVA vectors comprise one or more heterologous DNA sequences encoding a mutant S protein and/or N protein such as mutant S protein and/or N protein based on a variant of concern (VOC), including B.1.1.7 (Alpha), B.1.351 (Beta), P.1 (Gamma), B.1.617.2 (Delta), B.1.621 (Mu), C.37 (Lambda), C.1.2, BA.1 (Omicron), BA.2 (Omicron), BA.2.12.1 (Omicron), BA.4 (Omicron), BA.5 (Omicron), BA.2.75 (Omicron), BQ.1 (Omicron), BQ.1.1 (Omicron), and XBB (Omicron).

[0094] In some embodiments, the vaccines and/or immunogenic compositions are used for preventing or treating a coronavirus infection, for example, SARS-CoV-2 infection, caused by the ancestral Wuhan-Hu-1 reference strain or a VOC, including, but not limited to, B.1.1.7 (Alpha), B.1.351 (Beta), P.1 (Gamma), B.1.617.2 (Delta), B.1.621 (Mu), C.37 (Lambda), C.1.2, BA.1 (Omicron), BA.2 (Omicron), BA.2.12.1 (Omicron), BA.4 (Omicron), BA.5 (Omicron), BA.2.75 (Omicron), BQ.1 (Omicron), BQ.1.1 (Omicron), and XBB (Omicron).

[0095] In some embodiments, the encoded mutant S protein based on the B.1.617.2 lineage comprises one or more of the following mutations: T19R, E156G, Del157/158, S255F, L452R, T478K, D614G, P681R, D950N, G142D, Del156/157, R158G, A222, L5F, R21T, T51I, H66Y, K77T, D80Y, T951, G181V, R214H, P251L, D253A, V289I, V308L, A411S, G446V, T547I, A570S, T572I, Q613H, S640F, E661D, Q675H, T7191, P809S, A845S, I850L, A879S, D979E, A1078S, H1101Y, D1127G, L1141W, G1167V, K1191N, G1291V, and V1264L. Other mutations such as K417T may also be included.

[0096] In some embodiments, the encoded mutant S protein based on VOC lineage B.1.351 (Beta) comprises one or more of the following mutations: L18F, D80A, D215G, Del242-244, R2461, N501Y, E484K, K417N, D614G, and A701V.

[0097] In some embodiments, the encoded mutant S protein based on VOC lineage P.1 (Gamma) comprises one or more of the following mutations: L18F, T20N, P26S, Di 38Y, R190S, K417T, E484K, N501Y, D614G, H655Y, T10271, and V1167F.

[0098] In some embodiments, the encoded mutant S protein based on VOC lineage B.1.617.2 (Delta) comprises one or more of the following mutations: T19R, G142D, Del156-157, R158G, L452R, T478K, D614G, P681R, and D950N.

[0099] In some embodiments, the encoded mutant S protein based on VOC lineage B.1.617.2 (Delta) comprises one or more of the following mutations: T19R, K77T, Del157-158, L452R, T478K, D614G, P681R, and D950N.

[0100] In some embodiments, the encoded mutant S protein based on VOC lineage B.1.617.2 (Delta) comprises one or more of the following mutations: T19R, E156G, Del157-158, S255F, L452R, T478K, D614G, P681R, and D950N.

[0101] In some embodiments, the encoded mutant S protein based on VOC lineage B.1.617.2 (Delta) comprises one or more of the following mutations: T19R, L452R, T478K, D614G, P681R, and D950N and additionally one or more mutations comprising G142D, R158G, A222V, S255F, E156G, T951, K77T or deletions Del156-157 or Del157-158.

[0102] In some embodiments, the encoded mutant S protein based on VOC lineage B.1.1.529/BA.1 (Omicron) comprises one or more of the following mutations: A67V, Del69-70 (HV), T951, G142D, Del143-145 (VYY), Del211 (N), L212I, Ins214 (EPE), G339D, S371 L, S373P, S375F, K417N, N440K, G446S, S477N, T478K, E484A, Q493R, G496S, Q498R, N501Y, Y505H, T547K, D614G, H655Y, N679K, P681H, N764K, D796Y, N856K, Q954H, N969K, and L981F.

[0103] In some embodiments, the encoded mutant S protein based on VOC lineage BQ.1 (Omicron) comprises one or more of the following mutations: T191, Del24-26 (LPS), A27S, Del69-70 (HV), G142D, V213G, G339D, S371F, S373P, S375F, T376A, D405N, R408S, K417N, N440K, K444T, L452R, N460K, S477N, T478K, E484A, F486V, Q493Q, Q498R, N501Y, Y505H, D614G, H655Y, N679K, P681H, N764K, D796Y, Q954H, and N969K.

[0104] In some embodiments, the encoded mutant S protein based on VOC lineage BQ.1.1 (Omicron) comprises one or more of the following mutations: T191, Del24-26 (LPS), A27S, Del69-70 (HV), G142D, V213G, G339D, R346T, S371F, S373P, S375F, T376A, D405N, R408S, K417N, N440K, K444T, L452R, N460K, S477N, T478K, E484A, F486V, Q493Q, Q498R, N501Y, Y505H, D614G, H655Y, N679K, P681H, N764K, D796Y, Q954H, and N969K.

[0105] In some embodiments, the encoded mutant S protein based on VOC lineage XBB (Omicron) comprises one or more of the following mutations: T191, Del24-26 (LPS), A27S, V83A, G142D, Del144 (Y), H146Q, Q183E, V213E, G339H, R346T, L3681, S371F, S373P, S375F, T376A, D405N, R408S, K417N, N440K, V445P, G446S, N460K, S477N, T478K, E484A, F486S, F490S, R493Q, Q498R, N501Y, Y505H, D614G, H655Y, N679K, P681H, N764K, D796Y, Q954H, and N969K.

[0106] In some embodiments, the encoded mutant N protein based on VOC lineage B.1.351 (Beta) comprises a T2051 mutation.

[0107] In some embodiments, the encoded mutant N protein based on VOC lineage P.1 (Gamma) comprises one or more of the following mutations: P80R, R203K, and G204R.

[0108] In some embodiments, the encoded mutant N protein based on VOC lineage P.1 (Gamma) comprises one or more of the following mutations: P80R, R203K, and G204K.

[0109] In some embodiments, the encoded mutant N protein based on VOC lineage B.1.617.2 (Delta) comprises one or more of the following mutations: D63G, R203M, G215C, and D377Y.

[0110] In some embodiments, the encoded mutant N protein based on VOC lineage B.1.617.2 (Delta) comprises one or more of the following mutations: D63G, R203M, and D377Y.

[0111] In some embodiments, the encoded mutant N protein based on VOC lineage B.1.617.2 (Delta) comprises one or more of the following mutations: D63G, R203M, D377Y, and R385K.

[0112] In some embodiments, the encoded mutant N protein based on VOC lineage B.1.1.529/BA.1 (Omicron) comprises one or more of the following mutations: P13L, Del31-33 (ERS), R203K, G204R.

[0113] In some embodiments, the encoded mutant N protein based on VOC lineage BQ.1 (Omicron) comprises one or more of the following mutations: P13L, Del31-33 (ERS), E136D, R203K, G204R, and S413R.

[0114] In some embodiments, the encoded mutant N protein based on VOC lineage BQ.1.1 (Omicron) comprises one or more of the following mutations: P13L, Del31-33 (ERS), E136D, R203K, G204R, and S413R.

[0115] In some embodiments, the encoded mutant N protein based on VOC lineage XBB (Omicron) comprises one or more of the following mutations: P13L, Del31-33 (ERS), R203K, G204R, and S413R.

[0116] In some embodiments, the rsMVA vector used in the methods and compositions disclosed herein is used in a candidate vaccine composition referred to herein as sMVA-N/S (or COH04S1). COH04S1 is based on an rsMVA vector capable of expressing S and N antigens of SARS-CoV-2. MVA vectors have a robust safety record and are known for inducing humoral and cellular immune responses that provide long-term protection against several infectious diseases, including smallpox and cytomegalovirus. In a mouse model, robust immunogenicity of COH04S1 was demonstrated, and pre-clinical data in hamsters and non-human primates demonstrating protection from upper and lower respiratory tract infections following SARS-CoV-2 challenge.

[0117] A fully synthetic Modified Vaccinia Ankara (sMVA)-based vaccine platform is used to develop COH04S1, a multi-antigenic poxvirus-vectored SARS-CoV-2 vaccine that co-expresses full-length spike (S) and nucleocapsid (N) antigens. SEQ ID NO: 33 shows the sequence of COH04S1. The DNA and protein sequences for the S antigen of COH04S1 are represented by SEQ ID NOs: 5 and 6 in the Sequence Listing, and the DNA and protein sequences for the N antigen of COH04S1 are represented by SEQ ID NOs: 7 and 8 in the Sequence Listing. Additional constructs (e.g., sMVA-S/N, sMVA-S, sMVA-N) are also disclosed in International Application Publication No. WO 2021/236550, which is hereby incorporated by reference as if fully disclosed herein. In some embodiments, the sMVA-based vaccine comprises or consists of a nucleotide sequence set forth in SEQ ID NO: 33, or a nucleotide sequence that is at least about 80% identical (e.g., at least about 80%, at least about 85%, at least about 90%, at least about 95%, at least about 96%, at least about 97%, at least about 98%, at least about 99%, or about 100% identical) to the nucleotide sequence set forth in SEQ ID NO: 33.

[0118] In patients who have received HCT and B cell directed therapies (such as CD19, BCMA, or CD22-directed CAR-T cell therapies), inactivated vaccines have generally shown low incremental risks and have not caused or worsened graft-versus-host disease (GVHD); thus, inactivated vaccines are generally started after 3-6 months. Most experts recommend vaccination as long as the vaccine is safe for use, even if the expected protection rate is lower than the general population. At the end January 2021, the National Comprehensive Cancer Network® (NCCN®) released preliminary guidelines on COVID-19 vaccination in cancer patients. NCCN® indicated to prioritize vaccinating patients with active cancer on treatment (including hematopoietic and cellular therapy), those planned to start treatment and those immediately post treatment. There is no data on timing of vaccine administration, nonetheless NCCN® preliminarily recommends starting at least 3 months post HCT and cellular therapy.

[0119] The candidate vaccine is based on a synthetic attenuated modified vaccinia Ankara (MVA) vector expressing spike (S) and nucleocapsid (N) antigens of SARS-CoV-2. MVA vectors are used because they are known for inducing humoral and cellular immune responses that provide long-term protection against a number of infectious diseases, including smallpox and cytomegalovirus (CMV).

[0120] Although non-pathogenic and highly attenuated, MVA-based vaccines maintain high immunogenicity as demonstrated in various animal models and clinically in humans (6). In the late phase of the smallpox eradication campaign, MVA was used as a priming vector for the replication competent vaccinia-based vaccine in over 120,000 individuals in Germany, and no AE were reported. Since then, MVA has been used to develop a smallpox vaccine that is stored in the US Strategic National Stockpile in case of a smallpox outbreak.

[0121] Triplex, a MVA vectored CMV vaccine was specifically developed at City of Hope (COH) for HCT recipients at high risk for CMV sequalae. MVA was known to be highly tolerable and immunogenic when used in HCT recipients. Triplex safely induced robust and long-lasting T cell responses when tested first in healthy adults, and subsequently in immunosuppressed CMV seropositive HCT recipients, in whom significantly reduced clinically relevant CMV viremia. HCT recipients received two injections of Triplex early post-HCT on day 28 and 56 post-HCT, at a dose of 5.1×10⁸ pfu/mL, in a multicenter efficacy phase 2 trial. Overall, few adverse events (AE) have been observed in trials with adult and pediatric transplant recipients (NCT03354728, NCT03560752, and NCT04060277 studies performed at COH and NCT03383055 in Minnesota), and this demonstrates safety and tolerability of the MVA-based vaccine for hematology patients.

[0122] Based on safety records, durability and immunogenicity of MVA vectored vaccines in immunocompromised HCT recipients even early post-HCT when immune reconstitution is still incomplete, COH04S1 may be a valid SARS-CoV-2 candidate vaccine for patients with hematology malignancies who have received cellular therapy at least about 28 days or about 1 month previously, when immunocompetence is increased.

[0123] COH04S1, a poxvirus vectored SARS-CoV-2 vaccine that expresses SARS-CoV-2 spike (S) and nucleocapsid (N) proteins, uses the same MVA platform and is tested for the prevention of COVID-19 in healthy adults and immunosuppressed hematology patients.

[0124] The following examples are intended to illustrate various embodiments of the invention. As such, the specific embodiments discussed are not to be constructed as limitations on the scope of the invention. It will be apparent to one skilled in the art that various equivalents, changes, and modifications may be made without departing from the scope of invention, and it is understood that such equivalent embodiments are to be included herein. Further, all references cited in the disclosure are hereby incorporated by reference in their entirety, as if fully set forth herein.

### Additional Embodiments

[0125] In embodiments, disclosed herein are methods of vaccinating or protecting a subject against coronavirus disease 2019 (COVID-19) caused by a coronavirus infection in a subject comprising administering to the subject a composition comprising a recombinant synthetic MVA (rsMVA) vector comprising or capable of expressing one or more DNA sequences encoding a spike (S) protein and a nucleocapsid (N) protein or variants or mutants thereof, wherein the subject is a blood cancer patient that has been treated for a hematological malignancy with a cellular therapy.

[0126] In embodiments, disclosed herein are methods of preventing coronavirus infection in a subject comprising administering to the subject a composition comprising a recombinant synthetic MVA (rsMVA) vector comprising or capable of expressing one or more DNA sequences encoding a spike (S) protein and a nucleocapsid (N) protein or variants or mutants thereof, wherein the subject is a blood cancer patient that has been treated for a hematological malignancy with a cellular therapy.

[0127] In embodiments, disclosed herein are methods of preventing or reducing the severity of COVID-19 caused by coronavirus infection in a subject comprising administering to the subject a composition comprising a recombinant synthetic MVA (rsMVA) vector comprising or capable of expressing one or more DNA sequences encoding a spike (S) protein and a nucleocapsid (N) protein or variants or mutants thereof, wherein the subject is a blood cancer patient that has been treated for a hematological malignancy with a cellular therapy.

[0128] In embodiments, disclosed herein are methods of treating COVID-19 caused by coronavirus infection in a subject comprising administering to the subject a composition comprising a recombinant synthetic MVA (rsMVA) vector comprising or capable of expressing one or more DNA sequences encoding a spike (S) protein and a nucleocapsid (N) protein or variants or mutants thereof, wherein the subject is a blood cancer patient that has been treated for a hematological malignancy with a cellular therapy.

[0129] In embodiments, disclosed herein are uses of a composition for preventing or reducing the severity of COVID-19 caused by a coronavirus infection in a subject, wherein the composition comprises an rsMVA vector comprising or capable of expressing one or more DNA sequences encoding the S protein and the N protein or variants or mutants thereof, and wherein the subject is a blood cancer patient that has been treated for a hematological malignancy with a cellular therapy.

[0130] In embodiments, disclosed herein are uses of a composition for the manufacture of a medicament for the treatment of COVID-19 caused by coronavirus infection in a subject, wherein the composition comprises an rsMVA vector comprising or capable of expressing one or more DNA sequences encoding the S protein and the N protein or variants or mutants thereof, and wherein the subject is a blood cancer patient that has previously been treated for a hematological malignancy with a cellular therapy.

[0131] In embodiments, the composition is administered to the subject.

[0132] In embodiments, disclosed herein are compositions for use as a medicament, wherein the composition comprises an rsMVA vector comprising or capable of expressing one or more DNA sequences encoding the S protein and the N protein or variants or mutants thereof.

[0133] In embodiments, the compositions are for use in the treatment of COVID-19 caused by coronavirus infection.

[0134] In embodiments, disclosed herein are compositions for use in the treatment of COVID-19 caused by coronavirus infection, wherein the composition comprises an rsMVA vector comprising or capable of expressing one or more DNA sequences encoding the S protein and the N protein or variants or mutants thereof.

[0135] In embodiments, the composition is administered to a subject, wherein the subject is a blood cancer patient that has been treated for a hematological malignancy with a cellular therapy.

[0136] In embodiments, disclosed herein are methods of vaccinating or protecting a subject against coronavirus disease 2019 (COVID-19) caused by a coronavirus infection in a subject comprising administering to the subject a composition comprising a recombinant synthetic MVA (rsMVA) vector comprising or capable of expressing one or more DNA sequences encoding a spike (S) protein and a nucleocapsid (N) protein or variants or mutants thereof, wherein the subject is a blood cancer patient who has had or is likely to have a poor immune response to a different COVID-19 vaccination.

[0137] In embodiments, disclosed herein are methods of preventing coronavirus infection in a subject comprising administering to the subject a composition comprising a recombinant synthetic MVA (rsMVA) vector comprising or capable of expressing one or more DNA sequences encoding a spike (S) protein and a nucleocapsid (N) protein or variants or mutants thereof, wherein the subject is a blood cancer patient who has had or is likely to have a poor immune response to a different COVID-19 vaccination.

[0138] In embodiments, disclosed herein are methods of preventing or reducing the severity of COVID-19 caused by coronavirus infection in a subject comprising administering to the subject a composition comprising a recombinant synthetic MVA (rsMVA) vector comprising or capable of expressing one or more DNA sequences encoding the Spike (S) protein and the Nucleocapsid (N) protein or variants or mutants thereof, wherein the subject is a blood cancer patient who has had or is likely to have a poor immune response to a different COVID-19 vaccination.

[0139] In embodiments, disclosed herein are methods of treating COVID-19 caused by a coronavirus infection in a subject comprising administering to the subject a composition comprising a recombinant synthetic MVA (rsMVA) vector comprising or capable of expressing one or more DNA sequences encoding the Spike (S) protein and the Nucleocapsid (N) protein or variants or mutants thereof, wherein the subject is a blood cancer patient who has had or is likely to have a poor immune response to a different COVID-19 vaccination.

[0140] In embodiments, disclosed herein are uses of a composition for preventing or reducing the severity of COVID-19 caused by a coronavirus infection in a subject, wherein the composition comprises an rsMVA vector comprising or capable of expressing one or more DNA sequences encoding the S protein and the N protein or variants or mutants thereof, and wherein the subject is a blood cancer patient who has had or is likely to have a poor immune response to a different COVID-19 vaccination.

[0141] In embodiments, disclosed herein are uses of a composition for the manufacture of a medicament for the treatment of COVID-19 caused by a coronavirus infection in a subject, wherein the composition comprises an rsMVA vector comprising or capable of expressing one or more DNA sequences encoding the S protein and the N protein or variants or mutants thereof, and wherein the subject is a blood cancer patient who has had or is likely to have a poor immune response to a different COVID-19 vaccination.

[0142] In embodiments, the composition is administered to the subject.

[0143] In embodiments, disclosed herein are compositions for use as a medicament, wherein the composition comprises an rsMVA vector comprising or capable of expressing one or more DNA sequences encoding the S protein and the N protein or variants or mutants thereof.

[0144] In embodiments, the compositions are for use in the treatment of COVID-19 caused by a coronavirus infection.

[0145] In embodiments, disclosed herein are compositions for use in the treatment of COVID-19 caused by a coronavirus infection, wherein the composition comprises an rsMVA vector comprising or capable of expressing one or more DNA sequences encoding the S protein and the N protein or variants or mutants thereof.

[0146] In embodiments, the composition is administered to a subject, wherein the subject is a blood cancer patient who has had or is likely to have a poor immune response to a different COVID-19 vaccination.

[0147] In embodiments, the cellular therapy is selected from the group consisting of an autologous hematopoietic cell transplant, an allogeneic hematopoietic cell transplant, a chimeric antigen receptor (CAR) T cell therapy, and a combination thereof. In embodiments, the cellular therapy is an autologous hematopoietic cell transplant. In embodiments, the cellular therapy is an allogeneic hematopoietic cell transplant. In embodiments, the cellular therapy is a CAR T cell therapy.

[0148] In embodiments, the subject received the cellular therapy at least 1 week, at least 2 weeks, at least 3 weeks, at least 4 weeks, at least 1 month, at least 2 months, at least 3 months, at least 4 months, at least 4 months, at least 5 months, at least 6 months, at least 7 months, at least 8 months, at least 9 months, at least 10 months, at least 11 months, or at least 12 months prior to administration of the composition. In embodiments, the subject received the cellular therapy at least 1 week prior to administration of the composition. In embodiments, the subject received the cellular therapy at least 2 weeks prior to administration of the composition. In embodiments, the subject received the cellular therapy at least 3 weeks prior to administration of the composition. In embodiments, the subject received the cellular therapy at least 4 weeks prior to administration of the composition. In embodiments, the subject received the cellular therapy at least 1 month prior to administration of the composition. In embodiments, the subject received the cellular therapy at least 2 months prior to administration of the composition. In embodiments, the subject received the cellular therapy at least 3 months prior to administration of the composition. In embodiments, the subject received the cellular therapy at least 4 months prior to administration of the composition. In embodiments, the subject received the cellular therapy at least 5 months prior to administration of the composition. In embodiments, the subject received the cellular therapy at least 6 months prior to administration of the composition. In embodiments, the subject received the cellular therapy at least 7 months prior to administration of the composition. In embodiments, the subject received the cellular therapy at least 8 months prior to administration of the composition. In embodiments, the subject received the cellular therapy at least 9 months prior to administration of the composition. In embodiments, the subject received the cellular therapy at least 10 months prior to administration of the composition. In embodiments, the subject received the cellular therapy at least 11 months prior to administration of the composition. In embodiments, the subject received the cellular therapy at least 12 months prior to administration of the composition.

[0149] In embodiments, the subject received the cellular therapy between 1 week and 6 months, between 6 months and 12 months, or more than 12 months prior to administration of the composition. In embodiments, the subject received the cellular therapy between 1 week and 6 months prior to administration of the composition. In embodiments, the subject received the cellular therapy between 6 months and 12 months prior to administration of the composition. In embodiments, the subject received the cellular therapy more than 12 months prior to administration of the composition.

[0150] In embodiments, the coronavirus infection is caused by a variant of concern (VOC) including B.1.1.7 (Alpha), B.1.351 (Beta), P.1 (Gamma), B.1.617.2 (Delta), B.1.621 (Mu), C.37 (Lambda), C.1.2, BA.1 (Omicron), BA.2 (Omicron), BA.2.12.1 (Omicron), BA.4 (Omicron), BA.5 (Omicron), BA.2.75 (Omicron), BQ.1 (Omicron), BQ.1.1 (Omicron), and XBB (Omicron).

[0151] In embodiments, the composition is administered to the subject by intramuscular injection or intranasal administration (e.g., instillation). In embodiments, the composition is administered to the subject by intramuscular injection. In embodiments, the composition is administered to the subject by intranasal administration. In some embodiments, the composition is administered to the subject by intradermal injection. In some embodiments, the composition is administered to the subject by scarification.

[0152] In embodiments, the composition is administered to the subject in a single dose, two doses, three doses, four doses, or more than four doses. In embodiments, the composition is administered to the subject in a single dose. In embodiments, the composition is administered to the subject in two doses. In embodiments, the composition is administered to the subject in three doses. In embodiments, the composition is administered to the subject in four doses. In embodiments, the composition is administered to the subject in more than four doses.

[0153] In embodiments, the composition is administered to the subject in a prime dose followed by one or more booster doses.

[0154] In embodiments, the interval between the prime dose and the first booster dose is about 3 weeks, about 4 weeks, about 5 weeks, about 6 weeks, about 7 weeks, about 8 weeks, about 9 weeks, about 10 weeks, about 11 weeks, about 12 weeks, about 13 weeks, about 14 weeks, about 15 weeks, or about 16 weeks. In embodiments, the interval is about 3 weeks. In embodiments, the interval is about 4 weeks. In embodiments, the interval is about 5 weeks. In embodiments, the interval is about 6 weeks. In embodiments, the interval is about 7 weeks. In embodiments, the interval is about 8 weeks. In embodiments, the interval is about 9 weeks. In embodiments, the interval is about 10 weeks. In embodiments, the interval is about 11 weeks. In embodiments, the interval is about 12 weeks. In embodiments, the interval is about 13 weeks. In embodiments, the interval is about 14 weeks. In embodiments, the interval is about 15 weeks. In embodiments, the interval is about 16 weeks.

[0155] In embodiments, the prime dose is between 1.0×10⁷ PFU/dose and 5.0×10⁸ PFU/dose, for example, about 1.0×10⁷ PFU/dose, about 1.5×10⁷ PFU/dose, about 2.0×10⁷ PFU/dose, about 2.5×10⁷ PFU/dose, about 3.0×10⁷ PFU/dose, about 3.5×10⁷ PFU/dose, about 4.0×10⁷ PFU/dose, about 4.5×10⁷ PFU/dose, about 5.0×10⁷ PFU/dose, about 5.5×10⁷ PFU/dose, about 6.0×10⁷ PFU/dose, about 6.5×10⁷ PFU/dose, about 7.0×10⁷ PFU/dose, about 7.5×10⁷ PFU/dose, about 8.0×10⁷ PFU/dose, about 8.5×10⁷ PFU/dose, about 9.0×10⁷ PFU/dose, about 9.5×10⁷ PFU/dose, about 1.0×10⁸ PFU/dose, about 1.5×10⁸ PFU/dose, about 2.0×10⁸ PFU/dose, about 2.5×10⁸ PFU/dose, about 3.0×10⁸ PFU/dose, about 3.5×10⁸ PFU/dose, about 4.0×10⁸ PFU/dose, about 4.5×10⁸ PFU/dose, or about 5.0×10⁸ PFU/dose. In embodiments, the prime dose is about 1.0×10⁷ PFU/dose. In embodiments, the prime dose is about 1.5×10⁷ PFU/dose. In embodiments, the prime dose is about 2.0×10⁷ PFU/dose. In embodiments, the prime dose is about 2.5×10⁷ PFU/dose. In embodiments, the prime dose is about 3.0×10⁷ PFU/dose. In embodiments, the prime dose is about 3.5×10⁷ PFU/dose. In embodiments, the prime dose is about 4.0×10⁷ PFU/dose. In embodiments, the prime dose is about 4.5×10⁷ PFU/dose. In embodiments, the prime dose is about 5×10⁷ PFU/dose. In embodiments, the prime dose is about 5.5×10⁷ PFU/dose. In embodiments, the prime dose is about 6×10⁷ PFU/dose. In embodiments, the prime dose is about 6.5×10⁷ PFU/dose. In embodiments, the prime dose is about 7×10⁷ PFU/dose. In embodiments, the prime dose is about 7.5×10⁷ PFU/dose. In embodiments, the prime dose is about 8×10⁷ PFU/dose. In embodiments, the prime dose is about 8.5×10⁷ PFU/dose. In embodiments, the prime dose is about 9×10⁷ PFU/dose. In embodiments, the prime dose is about 9.5×10⁷ PFU/dose. In embodiments, the prime dose is about 1×10⁸ PFU/dose. In embodiments, the prime dose is about 1.5×10⁸ PFU/dose. In embodiments, the prime dose is about 2×10⁸ PFU/dose. In embodiments, the prime dose is about 2.5×10⁸ PFU/dose. In embodiments, the prime dose is about 3×10⁸ PFU/dose. In embodiments, the prime dose is about 3.5×10⁸ PFU/dose. In embodiments, the prime dose is about 4×10⁸ PFU/dose. In embodiments, the prime dose is about 4.5×10⁸ PFU/dose. In embodiments, the prime dose is about 5×10⁸ PFU/dose.

[0156] In embodiments, the booster dose is between 1.0×10⁷ PFU/dose and 5.0×10⁸ PFU/dose, for example, about 1.0×10⁷ PFU/dose, about 1.5×10⁷ PFU/dose, about 2.0×10⁷ PFU/dose, about 2.5×10⁷ PFU/dose, about 3.0×10⁷ PFU/dose, about 3.5×10⁷ PFU/dose, about 4.0×10⁷ PFU/dose, about 4.5×10⁷ PFU/dose, about 5.0×10⁷ PFU/dose, about 5.5×10⁷ PFU/dose, about 6.0×10⁷ PFU/dose, about 6.5×10⁷ PFU/dose, about 7.0×10⁷ PFU/dose, about 7.5×10⁷ PFU/dose, about 8.0×10⁷ PFU/dose, about 8.5×10⁷ PFU/dose, about 9.0×10⁷ PFU/dose, about 9.5×10⁷ PFU/dose, about 1.0×10⁸ PFU/dose, about 1.5×10⁸ PFU/dose, about 2.0×10⁸ PFU/dose, about 2.5×10⁸ PFU/dose, about 3.0×10⁸ PFU/dose, about 3.5×10⁸ PFU/dose, about 4.0×10⁸ PFU/dose, about 4.5×10⁸ PFU/dose, or about 5.0×10⁸ PFU/dose. In embodiments, the booster dose is about 1.0×10⁷ PFU/dose. In embodiments, the booster dose is about 1.5×10⁷ PFU/dose. In embodiments, the booster dose is about 2.0×10⁷ PFU/dose. In embodiments, the booster dose is about 2.5×10⁷ PFU/dose. In embodiments, the booster dose is about 3.0×10⁷ PFU/dose. In embodiments, the booster dose is about 3.5×10⁷ PFU/dose. In embodiments, the booster dose is about 4.0×10⁷ PFU/dose. In embodiments, the booster dose is about 4.5×10⁷ PFU/dose. In embodiments, the booster dose is about 5×10⁷ PFU/dose. In embodiments, the booster dose is about 5.5×10⁷ PFU/dose. In embodiments, the booster dose is about 6×10⁷ PFU/dose. In embodiments, the booster dose is about 6.5×10⁷ PFU/dose. In embodiments, the booster dose is about 7×10⁷ PFU/dose. In embodiments, the booster dose is about 7.5×10⁷ PFU/dose. In embodiments, the booster dose is about 8×10⁷ PFU/dose. In embodiments, the booster dose is about 8.5×10⁷ PFU/dose. In embodiments, the booster dose is about 9×10⁷ PFU/dose. In embodiments, the booster dose is about 9.5×10⁷ PFU/dose. In embodiments, the booster dose is about 1×10⁸ PFU/dose. In embodiments, the booster dose is about 1.5×10⁸ PFU/dose. In embodiments, the booster dose is about 2×10⁸ PFU/dose. In embodiments, the booster dose is about 2.5×10⁸ PFU/dose. In embodiments, the booster dose is about 3×10⁸ PFU/dose. In embodiments, the booster dose is about 3.5×10⁸ PFU/dose. In embodiments, the booster dose is about 4×10⁸ PFU/dose. In embodiments, the booster dose is about 4.5×10⁸ PFU/dose. In embodiments, the booster dose is about 5×10⁸ PFU/dose.

[0157] In embodiments, the booster dose is in a dosage the same as the prime dose.

[0158] In embodiments, the booster dose is in a dosage lower than the prime dose.

[0159] In embodiments, the subject suffers from or previously suffered from a hematological malignancy. In embodiments, the hematological malignancy is a B-cell hematological malignancy.

[0160] In embodiments, the subject suffers from or previously suffered from a B-cell lymphoid malignancy selected from the group consisting of chronic lymphocytic leukemia (CLL), B-cell non-Hodgkin lymphoma (B-NHL), Hodgkin lymphoma, B-cell acute lymphoblastic leukemia (ALL), and multiple myeloma. In embodiments, the B-cell lymphoid malignancy is CLL. In embodiments, the B-cell lymphoid malignancy is B-NHL. In embodiments, the B-cell lymphoid malignancy is Hodgkin lymphoma. In embodiments, the B-cell lymphoid malignancy is B-cell ALL. In embodiments, the B-cell lymphoid malignancy is multiple myeloma.

[0161] In embodiments, the subject has previously received one or more SARS-CoV-2 vaccines. In some embodiments, the previously received SARS-CoV-2 vaccine is an mRNA-, adenovirus-, or protein-based vaccine. In some embodiments, the previously received SARS-CoV-2 vaccine is Pfizer-BioNTech COVID-19 vaccine (BNT162b2), Moderna COVID-19 vaccine (mRNA-1273), Janssen COVID-19 vaccine (Ad26.COV2.S), Novavax COVID-19 vaccine adjuvanted, or Oxford-AstraZeneca ChAdOx1 nCoV-19 vaccine (AZD1222). In some embodiments, the previously received SARS-CoV-2 vaccine comprises an S antigen or a coding sequence for an S antigen only.

[0162] In embodiments, the subject developed poor immune response to the previous vaccination.

[0163] In embodiments, the subject received the previous vaccination at least 1 month, at least 2 months, at least 3 months, at least 4 months, at least 4 months, at least 5 months, at least 6 months, at least 7 months, at least 8 months, at least 9 months, at least 10 months, at least 11 months, or at least 12 months prior to administration of the rsMVA composition. In embodiments, the subject received the previous vaccination at least 1 month prior to administration of the rsMVA composition. In embodiments, the subject received the previous vaccination at least 2 months prior to administration of the rsMVA composition. In embodiments, the subject received the previous vaccination at least 3 months prior to administration of the rsMVA composition. In embodiments, the subject received the previous vaccination at least 4 months prior to administration of the rsMVA composition. In embodiments, the subject received the previous vaccination at least 5 months prior to administration of the rsMVA composition. In embodiments, the subject received the previous vaccination at least 6 months prior to administration of the rsMVA composition. In embodiments, the subject received the previous vaccination at least 7 months prior to administration of the rsMVA composition. In embodiments, the subject received the previous vaccination at least 8 months prior to administration of the rsMVA composition. In embodiments, the subject received the previous vaccination at least 9 months prior to administration of the rsMVA composition. In embodiments, the subject received the previous vaccination at least 10 months prior to administration of the rsMVA composition. In embodiments, the subject received the previous vaccination at least 11 months prior to administration of the rsMVA composition. In embodiments, the subject received the previous vaccination at least 12 months prior to administration of the rsMVA composition.

### EXAMPLES

### Example 1. Materials and Methods for Studies of COH04S1 Vaccination in Immunocompromised Individuals

[0164] Examples 2 and 3, describing studies of COH04S1 vaccinations in immunocompromised individuals, employed materials and methods as described below.

[0165] COH04S1 generation: Three unique synthetic sub-genomic sMVA fragments were designed based on the MVA genome sequence published previously (9). The entire sMVA was cloned as three fragments in Escherichia coli as bacterial artificial chromosome (BAC) clones using highly efficient BAC recombination techniques. The full-length SARS-CoV-2 S and N antigen sequences were inserted into commonly used MVA insertion sites located at different positions within the three sMVA fragments. The sMVA SARS-CoV-2 virus was reconstituted with fowl pox virus (FPV) as a helper virus upon co-transfection of the DNA plasmids into BHK-21 cells, which are non-permissive for FPV (10). The virus stocks were propagated on chicken embryo fibroblast (CEF) cells, which are commonly used for MVA vaccine production. The infected CEF cells were grown further, and the infected cells were harvested, freeze-thawed and stored at −80° C., then titrated on CEF cells to grow expanded virus stocks. To transition vaccine candidates into clinical production, viruses were plaque purified and clones expanded. Clone COH04S1 was selected for clinical vaccine production and the clinical stock used in this trial was produced on CEF at the COH Center for Biomedicine and Genetics (CBG).

[0166] SARS-CoV-2-specific IgA, IgG, and IgM measured in serum by ELISA: To evaluate humoral immunity with the COH04S1 vaccine, SARS-CoV-2 specific antibodies, including IgA, IgG, and IgM, in serum were measured by ELISA at various timepoints. The ELISA test was developed by and conducted in the Diamond Laboratory at COH, Dept. of Hematology & Hematopoietic Cell Transplantation. The assay identifies SARS-CoV-2 antibodies specific for the S receptor-binding domain (RBD) that interacts with ACE2 on the surface of the cells; the N protein that is one of the first B cell targets, during the initial phase of the SARS-CoV-2 infection; and the open reading frame (ORF)3b and 8 that are accurate serological markers of early and late SARS-CoV-2 infection (23, 25). The qualitative assays, based on previously established protocols (26), were developed to investigate Spike subunit 1 (S1)-, N-ORF3b- and 8-specific antibodies of the IgG, IgM and IgA subclasses in serum. Pools of SARS-CoV-2 convalescent serum or SARS-CoV-2 negative serum were used as a positive- and negative-controls (University of California at San Diego), respectively. End-point binding antibody titers were expressed as the reciprocal of the last sample dilution to give an OD value above the cut-off (26). Antibody levels in recipients were graphed on a time plot and compared to baseline level in donors.

[0167] SARS-CoV-2-specific neutralizing antibodies: Evaluation of SARS-CoV-2 neutralizing antibody titers in serum samples of COH04S1 vaccinated volunteers were performed at various timepoints. SARS-CoV-2 lentiviral-pseudovirus expressing the Spike antigen and infecting 293T cell lines engineered to express ACE2 is used (22). Spike incorporation into the pseudovirus was verified and quantified by Western blot using Spike-specific antibodies and by ELISA (18).

[0168] Th1 vs Th2 polarization: To evaluate the Th1 vs Th2 polarization of immune responses, dual fluorescence ELISPOT assay was performed to detect and quantify cells secreting IFNγ and IL-4. Briefly, isolated PBMCs are stimulated with Spike and Nucleocapsid peptide libraries (15-mers with 11 aa overlap) using fluorospot plates coated with IFNγ and IL-4 capture antibodies. Following 48 h co-incubation, the plates were washed, and IFNγ and IL-4 detection antibodies followed by fluorophore conjugates were added. The plates were read and analyzed with a fluorescent ELISPOT reader and number of spots after stimulation expressed following subtraction of background from unstimulated samples. As an exploratory endpoint, in selected samples, a cytokine-based cytofluorimetric analysis (ICS) was performed to analyzed multiple Th1 and Th2 cytokines. PBMCs (1-2×10⁶) were stimulated for 16 hours with SARS-CoV-2-S or SARS-CoV-2-N overlapping peptide libraries (15-mers with 11 aa overlap). Lymphocytes were stained with viability dye and surface stained with antibodies to CD3, CD8 and CD4. After fixing and permeabilization, the cells were stained intracellularly with antibodies against IFNγ, TNF-alpha, IL-2, IL-4, IL6, IL-13. After washing, the cells were acquired using BD FACS Celesta Cell Analyzer and analyzed with FlowJo software.

[0169] SARS-CoV-2-specific T-cell responses and evolution of activated/cycling and memory phenotype markers on the surface of antigens-specific T cells: Cellular immunity to SARS-CoV-2-S and —N, major domains of antiviral T cell immunity was investigated in PBMCs of COH04S1 vaccinated subjects, using multiparameter flow cytometry as previously disclosed (17). Frequencies of T lymphocyte precursors responsive to SARS-CoV-2-S or SARS-CoV-2-N overlapping peptide libraries were longitudinally monitored. In vaccine responders, SARS-CoV-2 specific T cells are further evaluated by measuring levels (17) of CD137 surface marker expressed on CD3+CD8+ and CD3+CD4+T cells stimulated for 24 hours with either SARS-CoV-2-S or SARS-CoV-2-N overlapping peptide libraries. CD137 is expressed only on recently activated T cells, and its expression correlates with functional activation of T cells (27). Measurements of CD137 levels were combined with immunophenotyping studies, by using antibodies to CD28 and CD45RA cell surface markers to assess and identify memory phenotype profiles percentage of effector memory (TEM and TEMRA), central memory (TCM) and naïve SARS-CoV-2-S or SARS-CoV-2-N specific T cells (7). The activated/cycling phenotype was assessed by using the CD38, HLA-DR, Ki67 and PD1 surface markers (24). Approximately 300,000 events per sample were acquired on a Gallios flow cytometer and analyzed by Kaluza software.

[0170] Pseudovirus production: SARS-CoV-2 pseudovirus was produced using a plasmid lentiviral system based on pALD-gag-pol, pALD-rev, and pALD-GFP (Aldevron). Plasmid pALD-GFP was modified to express Firefly luciferase (pALD-Fluc). Plasmid pCMV3-S(Sino Biological VG40589-UT) was utilized and modified to express SARS-CoV-2 Wuhan-Hu-1 S with D614G modification. Customized gene sequences cloned into pTwist-CMV-BetaGlobin (Twist Biosciences) were used to express SARS-CoV-2 VOC-specific S variants. All S antigens were expressed with C-terminal 19aa deletion. A transfection mixture was prepared 1 ml OptiMEM that contained 30 μl of TransIT-LT1 transfection reagent (Mirus MIR2300) and 6 μg pALD-Fluc, 6 μg pALD-gag-pol, 2.4 μg pALD-rev, and 6.6 μg S expression plasmid. The transfection mix was added to 5×10⁶ HEK293T/17 cells (ATCC CRL11268) seeded the day before in 10 cm dishes and the cells were incubated for 72 h at 37° C. Supernatant containing pseudovirus was harvested and frozen in aliquots at −80° C. Lentivirus was titrated using the Lenti-XTM p24 Rapid Titer Kit (Takara) according to the manufacturer's instructions.

### Example 2. A Phase 2 Randomized, Multi-Center, Observer-Blind Study of COH04S1 Versus EUA SARS-COV-2 Vaccine in Patients Post Cellular Therapy for Hematological Malignancies

### Study Design

[0171] The study was designed to evaluate the biological activity of COH04S1 compared to Pfizer vaccine using observer blinded randomization. Since the volumes and handling of the Pfizer and COH04S1 vaccinations were noticeably different, a double-blind study was not feasible; however, patients, physicians, and laboratory personnel analyzing the data were blinded to the participant study arm. The optimal timing post-transplant or CAR T cell therapies was assessed for safely eliciting an effective SARS-CoV-2 humoral and cellular immune response in HCT and CAR T cell recipients vaccinated with COH04S1 vs Pfizer vaccine. Detailed demographic characteristics of the participants are listed in Table 2.

TABLE 2
Demographic Characteristics

| | Allo | | Auto | | CART | | Total | |
|---|---|---|---|---|---|---|---|---|
| | (N = 7) | | (N = 5) | | (N = 1) | | (N = 13) | |
| Age at consent, years | | | | | | | | |
| Median | 55 | | 52 | | 73 | | 55 | |
| Interquartile range | 44, 65 | | 46, 67 | | 73, 73 | | 46, 66 | |
| Range | (38-66) | | (41-69) | | (73-73) | | (38-73) | |
| Age at consent, years | | | | | | | | |
| 18-64 | 5 | (71.4%) | 3 | (60%) | 0 | (0%) | 8 | (61.5%) |
| 65+ | 2 | (28.6%) | 2 | (40%) | 1 | (100%) | 5 | (38.5%) |
| Gender | | | | | | | | |
| Female | 4 | (57.1%) | 4 | (80%) | 0 | (0%) | 8 | (61.5%) |
| Male | 3 | (42.9%) | 1 | (20%) | 1 | (100%) | 5 | (38.5%) |
| Ethnicity | | | | | | | | |
| Hispanic or Latino | 1 | (14.3%) | 1 | (20%) | 0 | (0%) | 2 | (15.4%) |
| Non-Hispanic or Non- | 5 | (71.4%) | 4 | (80%) | 0 | (0%) | 9 | (69.2%) |
| Latino | | | | | | | | |
| Non-disclosed | 1 | (14.3%) | 0 | (0%) | 1 | (100%) | 2 | (15.4%) |
| Caucasian | 5 | (71.4%) | 4 | (80%) | 1 | (100%) | 10 | (76.9%) |
| Black | 0 | (0%) | 1 | (20%) | 0 | (0%) | 1 | (7.7%) |
| Asian | 1 | (14.3%) | 0 | (0%) | 0 | (0%) | 1 | (7.7%) |
| NonDisclosed | 1 | (14.3%) | 0 | (0%) | 0 | (0%) | 1 | (7.7%) |
| TimeCohort | | | | | | | | |
| 3 −< 6 months | 4 | (57.1%) | 4 | (80%) | 0 | (0%) | 8 | (61.5%) |
| 6 −< 12 months | 3 | (42.9%) | 1 | (20%) | 1 | (100%) | 5 | (38.5%) |

(report generated on 15 Nov. 2022)

[0172] A further objective of the study was to test safety and immunogenicity of COH04S1 given as two doses vaccination course to patients post hematopoietic cell transplant (HCT) or chimeric antigen receptor (CAR)-T cell therapy for hematologic malignancies at least 3 months prior. Two injections (or four per the amended protocol which applied to 5 patients) of COH04S1 vaccine will be administered at 2.5×10⁸ PFU/dose by intramuscular (IM) injection in the upper arm, 4 weeks apart compared to standard of care (SOC) vaccine (Comirnaty or similar). Primary objectives are safety and at least a 3-fold increase in neutralizing antibodies and/or SAR-CoV-2 S specific IFNγ levels 28 days after the second injection. Accrual is set to 240 subjects. A safety lead in segment (single arm) with 3 parallel treatment groups in 3+3 design and open label COH04S1 vaccination will precede the randomized blinded phase 2 segment. The safety lead in segment will enroll 6 autologous transplant (AUTO), allogeneic transplant (ALLO), and CAR-T cell therapy patients. If no safety concerns arise, the randomized portion of each treatment group will be started and retrospectively stratified by time from transplant into 3<6, 6<12, and ≥12 months.

[0173] COH04S1, a multiantigen synthetic modified vaccinia Ankara (sMVA) vector that co-expresses Wuhan-Hu-1-based S and nucleocapsid (N) antigens, was developed. The N antigen was included in COH04S1 primarily based on the rationale to broaden the stimulation of T cells, which are known to be less susceptible to antigen variation than NAb and therefore considered a critical second line of defense to provide long-term protective immunity against SARS-CoV-2. COH04S1 afforded protection against SARS-CoV-2 ancestral virus and Beta and Delta variants in Syrian hamsters and non-human primates and was safe and immunogenic in a Phase 1 clinical trial in healthy adults. Importantly, T cell responses to both the S and N antigens elicited in COH04S1-vaccinated individuals maintained potent cross-reactivity to SARS-CoV-2 Delta and Omicron BA.1 variants for up to six months post-vaccination, whereas NAb responses elicited by COH04S1, as shown for other COVID-19 vaccines, decreased and conferred reduced neutralizing activity against Delta and Omicron BA.1 variants. COH04S1 is currently being tested in multiple Phase 2 clinical trials in healthy volunteers and in cancer patients.

[0174] Critical materials and reagents used are listed in Table 3.

TABLE 3
Critical Materials and Reagents

| Item | Manufacturer | Product ID/Lot # |
|---|---|---|
| Spike peptide library | Genscript | Custom order |
| Spike MegaPool (MP) | LJII | A gift from A. Grifoni/A. |
| | | Sette (LJII) |
| Nucleocapsid peptide library | Genscript | Custom made |
| Membrane peptide library | COH peptide core | Custom made |
| S1 + S2 | SinoBiological | 40589-V08B1 |
| N | SinoBiological | 40588-V08B |
| RBD | SinoBiological | 40592-V08H |
| Goat anti-human IgG-HRP | BioRad | 204005 |
| Natural Goat Serum NGS | Vector Labs | S-1000-500-1 |
| WHO reference panel | NIBSC | 20/268 |
| Hammerstein Casein | Thermo Scientific | J12840-22 |
| TMB-ELISA | Thermo Scientific | 34029 |
| Spike-D614G expression vector | Twist Bioscience | Custom order |
| Spike-Beta expression vector | Twist Bioscience | Custom order |
| Spike-Delta expression vector | Twist Bioscience | Custom order |
| Spike-Omicron BA.1 expression | Twist Bioscience | Custom order |
| vector | | |
| pALD-Lenti system | Aldevron | pALD-LentiEGFP-K |
| | | (modified to express |
| | | Luciferase) |
| | | pALD-GagPol-K |
| | | pALD-Rev-K |
| HEK293T/17 | ATCC | CRL11268 |
| TransIT-Lenti transfection reagent | Mirus | MIR6600 |
| Lenti-XTM p24 Rapid Titer Kit | Takara | |
| HEK293T-ACE2 cells | | A gift from J. Bloom |
| | | (Fred Hutchinson |
| | | Cancer Research |
| | | Center) |
| Viability Dye L/D Near IR | Invitrogen | L34975 |
| Anti-CD3 | Biolegend | 300440 |
| Anti-CD4 | BD | 566703 |
| Anti-CD8 | BD | 301040 |
| Anti-CD137 | Biolegend | 309810 |
| Anti-OX40 | Biolegend | 350012 |
| Anti-CD69 | BD | 555531 |
| Anti-CD14/CD19 | Biolegend | 561391/561121 |
| Anti-CD45RA | Biolegend | 304156 |
| Anti-CCR7 | Biolegend | 353236 |
| Human Serum | BioIVT | HP1022HI |
| PHA | Roche | 11082132001 |
| Human IFN-g/IL-4 FluoroSpot Flex Kit | Mabtech | X-01A16B-10 |
| Benzonase Nuclease | Santa Cruz | SC-202391A |
| | Biotech | |

[0175] Clinical-grade COH04S1 produced by Applicant's GMP manufacturing facility using CEF cells was used for this Phase 2 clinical trial. Before each injection, COH04S1 was thawed and diluted with sterile diluent (phosphate-buffered saline with 7-5% lactose) to the appropriate dose of 2.5×10⁸ pfu.

[0176] COH04S1 was injected in two doses (or four in the amended protocol covering few patients before the original protocol was reinstated). After the safety lead in portion, the trial was randomized and blinded to the study participants, the data investigator(s) or data collector(s) and the data analyzer(s) to the vaccine administered (COH04S1 or SOC). Blood collection for serum and PBMC evaluation was carried out at screening and at days 28, 56, 120, 180, 270, and 365 post-vaccination.

[0177] A total of 258 cell therapy recipients comprised of 3 cohorts were enrolled: auto HCT, allo HCT, and CAR-T cell therapy recipients and were retrospectively stratified into 3 time interval cohorts: those who received cellular therapy in the last 3-<6 months, those who received cellular therapy in the last 6-<12 months, and those who received cellular therapy 12 months or greater.

[0178] Eligible patients were retrospectively stratified by time interval cohort and prospectively by type of cellular therapies (9 total strata) and 1:1 randomized into either COH04S1 or Pfizer vaccine. Each patient received 2 injections of 2.5×10⁸ PFU/dose of COH04S1 or Pfizer vaccine on days 0 (prime) and 28 (boost) and was followed for 1 year. The dose of COH04S1 was chosen based on experiences with other MVA-based vaccines (19-21). All adverse events were evaluated from first vaccination to 28 days after the second injection (expected to be day 35), and serious or unexpected adverse events at any time through one year. Rates of non-relapse mortality (NRM), severe GVHD, severe COVID-19 infection and UT/MOD were assessed at the End of Treatment (EOT) visit ˜28 days post last vaccination. Long-term assessment evaluations continued through 1 year after vaccination. At ˜ 28 days after the second injection, all fully vaccinated HCT and CAR T cell therapy recipients received the primary immunological assessment (PIA).

[0179] FIG. 1 shows the subject flow. Long-term assessment on evaluations continued through 365-days after vaccination. FIGS. 2A-2B show the treatment schema.

[0180] The immunologic activity and safety of the COH04S1 vaccine were evaluated in former recipients of cellular therapy for hematological malignancies. Participants received two IM injections (2.5×10⁸ PFU/dose) of either COH04S1 or a 2-dose Pfizer COVID-19 vaccine in the upper arm in the outpatient setting, 28 days apart, on Days 0 and 28 of the study (Table 4).

TABLE 4
Vaccine Type and Administration

| Vaccine | Injection 1 (day 0) | Injection 2 (day 28 + 7*) |
|---|---|---|
| COH04S1 | 2.5 × 10⁸ PFU/dose (IM) | 2.5 × 10⁸ PFU/dose (IM) |
| Pfizer | SOC dose | SOC dose |

*There was a 7-day window to allow for scheduling issues. Delay of up to 6 weeks was allowed.

[0181] All AEs were evaluated from the first vaccination to 28 days after the last injection (˜day 56). Long-term assessment with limited safety data collection and immunological response sampling continued through 365-days post-vaccination (first injection), with follow up at days 7, 90, 120, 180, and 365. Toxicity was graded according to the Common Terminology Criteria for Adverse Events (CTCAE) version 5.0.

[0182] A comprehensive and innovative panel of immune assays combined with safe and versatile virological tools was designed to characterize the COH04S1 vaccine induced SARS-CoV-2-specific adaptive immunity in this clinical trial. The integrated platform of immune- and pseudovirus-based methods included analytical multiparameter flow cytometry; qualitative in house developed ELISA, and neutralization assays based on a SARS-CoV-2 lentiviral-pseudovirus system, expressing the Spike antigen and infecting cell lines engineered to express ACE2 (18). The assay system with Spike antigen “pseudotyped” onto non-replicative lentiviral particles alleviates the biosafety-level-3 (BSL3) hazard associated with working directly with SARS-CoV-2 and allows a safer approach to assess sera neutralizing activity to SARS-CoV-2.

[0183] Humoral immunity (IgA, IgG, and IgM) in serum was assessed by ELISA. The neutralizing capability of the antibodies to prevent infection of a susceptible cell line was evaluated using a pseudo-type of the SARS-CoV-2 virus. To evaluate the Th1 vs Th2 polarization of immune responses, which has been observed in convalescing COVID-19 cases, a SARS-CoV-2-specific ELISPOT was performed to measure IFNγ and IL-4 cytokine levels, by using overlapping peptide libraries specific for SARS-CoV-2. Additionally, the following were evaluated: a) levels of antigen-specific T cell responses using overlapping peptide library specific for SARS-CoV-2; and b) functional activated/cycling and memory phenotype marker evolution on the surface of antigen specific T cells elicited as a result of the vaccination.

[0184] All subjects with intercurrent infections were tested for SARS-CoV-2 PCR assay, as a record any incidental COVID-19 infection during the study follow-up period, and the biological correlatives of infected subjects were compared with those uninfected, along with recording the severity of disease to evaluate for the potential of vaccine-induced disease enhancement.

[0185] The immune response measured at the PIA visit (28 days+7 post second injection) was the primary endpoint and was counted as positive if meeting any of the following criteria:
[0186] 1. ≥3-fold increase in SARS-CoV-2-neutralizing antibodies over baseline or lower limit of quantification (LLOQ), whichever is higher;
[0187] 2. ≥3-fold increase in SARS-CoV-2-IFNγ levels over baseline or LLOQ, whichever is higher.

[0188] The immune response was categorized as negative if none of the above defined criteria were met.

[0189] The primary statistical analysis compared the immune response at day 28 post the second injection between COH04S1 and Pfizer using a one-sided stratified CMH test. The point estimate and 95% CI were calculated per arm for immune response at day 28 post the second injection. Bar charts were generated to show the immune response rate by arm overall, and by arm and strata. All randomized participants were included in the primary analytic set. The comparison of the primary endpoint was based on intent-to-treat analysis.

[0190] Secondary analyses: Per protocol analysis was performed (1) comparison of the primary endpoint by the first vaccine participants actually received, (2) two injections were completed, (3) the primary endpoint was successfully measured. Continuous immune response markers were summarized by means or geometric means and standard deviations if the assumption of normal distribution was not violated. Repeated immune response measurements at the multiple time points were analyzed using generalized estimating equations (GEE) or mixed regression models. Scatterplots of immune response markers across time points by arm were generated to visualize the differences.

[0191] The primary analytic set of the safety data in both the safety lead-in and randomized phase 2 segments included subjects who received at least one injection of a vaccine. Descriptive statistics was used to summarize the safety profile. Tables or graphs were constructed to summarize solicited local and systemic adverse events, MOD, UT, NRM, and other safety endpoints by type of cellular therapy in the safety lead-in segment and by arm and each stratum in the randomized phase 2 segment.

### Study Analysis

[0192] SARS-CoV-2 binding antibodies. Binding antibody titers were evaluated by ELISA. ELISA plates were coated overnight with 1 μg/ml of S (S1+S2, 40589-V08B1, SinoBiological), RBD (40592-V08H, SinoBiological), or N (40588-V08B, SinoBiological) in coating buffer (1×PBS pH 7.4). Plates were washed 5 times with 250 μl/well PBST (PBS pH 7.4+0.1% Tween-20). Plates were blocked with 250 μl/well of assay diluent (154 mM NaCl/0.5% Casein/10 mM Tris-HCl/0.1% Tween-20 pH 7.6/8% NGS) for 2 hours at 37° C. Sample dilutions and WHO standards were prepared in assay diluent. Serum samples were diluted 1:150, 1:900, 1:4500, and 1:13500). WHO standards (High, Medium, Low S, Low) were initially diluted 1:9 and then further diluted 1:6. Sample dilutions and WHO standards were added to the plate (100 μl/well) after washing 5× and incubated wrapped in foil at 37° C. and 5% CO2. After washing 5×, 1:3,000 dilution of HRP-conjugated anti-human IgG secondary antibody was added and incubated for one additional hour at room temperature. After 7× washing, plates were developed using 1-Step Ultra TMB-ELISA for 3 (S), 4 (N), and 5 (RBD) minutes after which the reaction was stopped with 1M H2SO4. Plates were read at 450 nm wavelengths using FilterMax F3 microplate reader. Sample concentration expressed in BAU/ml was extrapolated from the standard curve obtained with the assigned WHO standard values transformed based on the assay dilutions (Table 5).

TABLE 5
WHO standards assigned values and values used
to create standard curve in FilterMax F3

| Antigen | Standard | Cat# | WHO BAU/ul | FilterMax BAU/ml |
|---|---|---|---|---|
| S | High | 20/150 | 832 | 616.296 |
| | Mid | 20/148 | 241 | 178 |
| | Low-S/High-N | 20/144 | 86 | 63.704 |
| | Low | 20/140 | 53 | 39.259 |
| RBD | High | 20/150 | 817 | 605.185 |
| | Mid | 20/148 | 205 | 151.852 |
| | Low-S/High-N | 20/144 | 66 | 48.889 |
| | Low | 20/140 | 45 | 33.33 |
| N | High | 20/150 | 713 | 528.148 |
| | Mid | 20/148 | 295 | 218.519 |
| | Low-S/High-N | 20/144 | 146 | 108.148 |
| | Low | 20/140 | 12 | 8.889 |

[0193] SARS-CoV-2 pseudovirus neutralization assay. Serum samples were heat inactivated, diluted using 2-fold serial dilutions in complete DMEM. Diluted serum samples were co-incubated overnight at 4° C. with pseudotyped luciferase lentiviral vector expressing SARS-CoV-2 Spike glycoprotein on the envelope in a poly-L-lysine coated 96-well plate. The amount of pseudovirus was pre-determined based on the target relative luciferase units (RLU) of each variant and ranged between 5×10⁵ and 2×10⁶. Next day, the 96 well plates were allowed to equilibrate to room temperature. HEK293T cells overexpressing ACE-2 receptor were then seeded at a density of 1×10⁵ cells/ml in complete DMEM containing 10 μg/ml of polybrene. The cells were incubated for 48 hours at 37° C. and 5% CO₂ atmosphere. Following incubation, media was aspirated, and the cells lysed in a shaker at room temperature using 40 μl/well of Luciferase Cell Culture Lysis Reagent. Cell lysates were transferred to white 96-well plates and Luciferase activity were measured by sequential injection of 100 μl/well of Luciferase Assay Reagent substrate. RLU were quantified using a microplate reader with injector at a 570 nm wavelength.

[0194] IFNγ/IL-4 ELISpot. FluoroSpot plates were prepared by adding 15 μl/well of 35% EtOH for less than a minute. Plates were washed 5× with 200 μl/well of sterile H2O. IFNγ and IL-4 capture antibodies were diluted to 15 μg/ml in sterile PBS and 100 μl/well of antibody were added in each well and incubated overnight at 4° C. PBMCs were thawed, and 1 ml RPMI with benzonase (50 U/ml) was added to the tube. Cells were transferred to a 15 ml conical pre-filled with 12 ml RPMI with benzonase (50 U/ml). Conicals were centrifuged at 300×G for 10 minutes. Media was aspirated and cells resuspended in 12 ml of fresh, warm media without benzonase. Conicals were centrifuged at 300×G for 10 minutes. Cells were resuspended in 2 ml RPMI medium and rested for 2 hours at 37° C./5% CO2. Coated plates were washed 5× with sterile PBS and 200 μl/well of CTL test medium added to each well and the plate incubated at 37° C./5% CO2 for at least 30 minutes. Conicals were centrifuged at 300×G for 10 minutes and resuspended in 1 ml CTL test medium. Cells were counted and resuspended to 3×10⁶ cells/ml in CTL test medium. Genscript Spike peptide library consisting of 316 peptides was divided into four sub-libraries: 1S1 (peptides 1-86), 2S1 (87-168), 1S2 (169-242, excluding peptide 173), 2S2 (243-316, excluding peptides 304-309). Peptide dilutions were prepared in CTL test media added with anti-CD28 0.2 μg/ml as shown in Table 6. 50 μl/well of peptide mix were added to the corresponding rows in the FluoroSpot plate. 50 μl/well of cell suspension (1.5×10⁵ cells) were added to the corresponding columns in the FluoroSpot plate. 5×10⁴ cells/wells were added to the PHA controls. Plates were wrapped in foil and incubated 37° C./5% CO2. After 40-42 hours, plates were washed 5× with PBS. IFNγ and IL-4 detection antibodies were diluted 200× with 0.1% BSA/PBS and sterile filtered (0.22 μm). 100 μl/well of detection antibody in CTL test medium were added to each well and incubated 2 hours at room temperature. Plates were washed 5× with PBS. Fluorophore-conjugated antibodies were diluted 200× in 0.1% BSA/PBS and sterile filtered (0.22 μm). 100 μl/well of detection antibody in CTL test medium were added to each well and incubated 1 hour at room temperature. Plates were washed 5× with PBS. 50 μl/well of fluorescence enhancer were added to each well and incubated 10 minutes at room temperature away from light. Fluorescence enhancer was removed by flicking the plate and plates were dried away from light under the airflow of a biological cabinet. Plates were scanned (490 nm and 550 nm wavelength) and analyzed using ImmunoSpot plate reader.

TABLE 6
Antibody Mix Composition

| # | Ab | Fluorochrome | Dilution |
|---|---|---|---|
| 1 | CD3 | FITC | 1:40 |
| 2 | CD45RA | PerCp | 1:20 |
| 3 | CD137 | APC | 1:40 |
| 4 | LIVE/DEAD | NearIR | 1:1000 |
| 5 | CD4 | BV421 | 1:50 |
| Dump channel | CD14 | V500 | 1:100 |
| Dump channel | CD19 | V500 | 1:100 |
| 7 | CD8 | BV605 | 1:100 |
| 8 | CD69 | PE | 1:10 |
| 9 | CCR7 | PE/Dazzle | 1:20 |
| 10 | OX40 | PE-Cy7 | 1:20 |

[0195] AIM and T cell memory markers. PBMCs were thawed and counted, and concentration adjusted to 10×10⁶ cells/ml using HR-5 media. 1 million cells (100 μl) were plated in 96-well plates and stimuli were added at a concentration of 2 μg/ml (2×) in 100 μl HR-5 media. Plates were incubated for 24 hours at 37° C./5% CO₂. After the stimulation, plates were spun at 2000 rpm at 4° C. for 5 min. In each well, 50 μl of antibody mix was added (Table 7) and incubated 15 minutes at room temperature in the dark. After incubation, 150 μl PBS were added in each well and plates were spun at 2000 rpm at 4° C. for 3 min. Plates were further washed with 150 μl PBS and spun at 2000 rpm at 4° C. for 3 min. Cells were resuspended in 250 μl of PBS and maintained at 4° C. until acquisition using Attune NxT cytofluorimeter.

TABLE 7
Stimuli Dilution

| | | | | Assay | |
|---|---|---|---|---|---|
| | Stock | Dilution | Dilution | Conc. | Volume/ |
| Stimulation | (mg/ml) | (ug/ml) | Factor | (ug/ml) | well (ul) |
| DMSO | | | 2 | | 50 |
| 1S1 | 1 | 2 | 2 | 1 | 50 |
| 2S1 | 1 | 2 | 2 | 1 | 50 |
| 1S2 | 1 | 2 | 2 | 1 | 50 |
| 2S2 | 1 | 2 | 2 | 1 | 50 |
| N | 1 | 2 | 2 | 1 | 50 |
| M | 1 | 2 | 2 | 1 | 50 |
| PHA | 5 | 10 | 2 | 5 | 50 |

[0196] Statistics. Statistical evaluation was pursued using GraphPad Prism (v8.3.0). Wilcoxon matched-pairs signed rank test was used to compare baseline values to post-vaccination values.

[0197] Immunogenicity Results. As of Nov. 7, 2022, 13 volunteers in the safety lead-in portion (6 ALLO, 6 AUTO, and 1 CAR-T) had received at least one dose of COH04S1. Of these, 8 had reached day 180 timepoint. Analysis is provided for a subgroup of samples. In the randomized portion, 2 ALLO patients had received at least one dose of vaccine (COH04S1 or Pfizer, FIG. 5).

[0198] SARS-CoV-2 binding antibodies. Most patients showed a robust increase in S- and RBD-specific IgG titers after one COH04S1 dose and a booster effect after the second dose was evident (FIG. 6). However, CAR-T cell therapy patient COH206 did not show an increase in SARS-CoV-2 specific-IgG post-COH04S1 vaccination. An increase in N-specific IgG was observed in more than half of the patients.

[0199] Statistical evaluation indicated a significant increase in S-specific IgG titers at day 28, 56 and 120 post-vaccination. RBD-specific IgG titers were significantly elevated compared to baseline at days 28 and 56 post-vaccination. N-specific IgG titers were significantly elevated compared to baseline one month after the second COH04S1 vaccination (FIG. 7). Of note, median S and RBD IgG titers at day 180 were more elevated that median titers measured in both healthcare workers (n=30) vaccinated with BNT162b2 (Comirnaty, Pfizer) at the beginning of the pandemic, and median IgG titers measured in healthy adults (n=30) vaccinated with COH04S1 (mostly at 1×10⁷ pfu, but also at 1×10⁸ pfu and 2.5×10⁸ pfu).

[0200] SARS-CoV-2 neutralizing antibodies. Titers of neutralizing antibodies against ancestral SARS-CoV-2 and SARS-CoV-2 Beta, Delta, and Omicron BA.1 VOC were measured in serum of patients at baseline and at 28, 56, 120 and 180 days after COH04S1 vaccination. In most cases, COH04S1 booster vaccination resulted in a >3-fold increase in NAb titers against SARS-CoV-2 and its VOC compared to baseline (FIG. 7). Fold increase in NAb titers ranged from 6× to 1,970× with the exception of CAR-T cell recipient COH206 who did not respond to COH04S1 with an increase in SARS-CoV-2 specific NAb. Magnitude of NAb response to SARS-CoV-2 variants was comparable to ancestral SARS-CoV-2 (D614G) but with slightly reduced titers especially when evaluated against Omicron.

[0201] Statistical evaluation revealed a significant increase in SARS-CoV-2 specific NAb titers at 28- and 56-days post-vaccination for all the strains evaluated (FIG. 8). Remarkably, median NT50 titers approaching 103 were measured in boosted volunteers against Omicron BA.1 which is known to escape NAb resulting in lower titers. Of note, median ancestral-specific NAb titers at day 56 were more elevated that median titers measured in healthcare workers (n=30) vaccinated with BNT162b2 (Comirnaty, Pfizer) at the beginning of the pandemic, and compared to median titers measured in healthy adults (n=30) vaccinated with COH04S1 (mostly at 1×10⁷ pfu, but also at 1×10⁸ pfu and 2.5×10⁸ pfu).

[0202] IFNγ/IL-4 T cell responses. T cells secreting IFNγ and/or IL-4 cytokines upon stimulation with SARS-CoV-2 S-, N-, and M-specific peptide libraries were measured in PBMCs from patients at 28-, 56-, 120-, 180- and 270-days post-vaccination with COH04S1 using FluoroSpot assay. An increase in S- and/or N-specific T cells secreting IFNγ was observed in most patients after COH04S1 vaccination (FIG. 10). The majority of patients had a more robust response to S than N, possibly due to the presence in the graft of vaccine-induced S-specific T cells acquired pre-transplant. The only exception was COH202, who was COVID-19-positive few days before day 56 sampling and showed balanced T cell response to N and S, probably because SARS-CoV-2 infection induced a robust recall response to both vaccine antigens. Interestingly, CAR-T cell therapy patient COH206, despite the absence of vaccine-induced humoral responses, developed robust T cell responses to both S and N antigens with S-specific T cells peaking at about 15,000 spots/10⁶ cells. This result was unexpected, as the immunity was mainly T cell-based as opposed to other EUA and FDA-approved vaccines in these patients.

[0203] Statistical evaluation indicated that both S- and N-specific IFNγ T cell responses were significantly elevated after the second dose of COH04S1 compared to baseline (FIG. 11). Of note, median S- and N-specific IFNγ T cell responses at day 56 were more elevated that median T cell levels measured in healthcare workers (n=30) vaccinated with BNT162b2 (Comirnaty, Pfizer) at the beginning of the pandemic, and compared to median S- and N-specific T cell responses measured in healthy adults (n=30) vaccinated with COH04S1.

[0204] IL-4 responses against all antigens were low throughout the study. Both S- and N-specific T cells secreting IL-4 did not increase significantly following vaccination with COH04S1 (FIG. 12).

[0205] Activation-induced marker positive T cells. T cells expressing activation induced markers (AIM+) upon stimulation with SARS-CoV-2 S and N peptides were evaluated in samples of COH04S1 vaccinated patients at baseline and at days 28, 56, 120 and 180 post-vaccination. As shown in FIG. 13, a significant increase in S-specific AIM+CD4+ and CD8+ T cells was measured after the prime dose, whereas a significant increase in both S- and N-specific AIM+CD4+ and CD8+ T cells was measured after two vaccine doses.

[0206] Vaccination of autologous and allogeneic transplant patients with COH04S1 at 2.5×10⁸ pfu resulted in a significant increase in S- and N-specific IgG and T cells and SARS-CoV-2 specific NAb. The only CAR-T cell patient enrolled at this moment, despite the absence of SARS-CoV-2 specific antibodies, developed a robust T cell response post-vaccination. These results indicate a better response in this patient population compared to healthy adults naïve for SARS-CoV-2 possibly due to SARS-CoV-2 immunity acquired pre-transplant and present in the graft.

### Example 3. Trial of COH04S1 in Patients Having Poor Immune Response to Previous COVID-19 Vaccination

[0207] This study is designed as a single-center, phase 2, multiple-patient-type trial following an open label safety lead-in phase to evaluate immune response at day 56 post COVID-19 vaccine boost using a synthetic MVA-based SARS-CoV-2 vaccine boost (COH04S1). Patients will receive a single intramuscular booster injection of COH04S1 at 2.5×10⁸ PFU/dose or a Pfizer COVID-19 vaccine SOC. The various patient types tested consist of groups of patients with related malignant disease or therapy. The first type is patients with B-cell hematologic malignancies.

[0208] Toxicity is the primary endpoint in the safety lead-in phase. A standard 3+3 design is used as ‘go’ or ‘not to go’ vaccinate additional subjects. A cohort of 3 subjects is vaccinated with COH04S1 first. Moderate toxicity (MOD): grade 2 AEs (based on CTCAE version 5.0) probably or definitely attributable to COH04S1 vaccines, and lasting 7 days or longer are monitored from vaccination of COH04S1 to the first occurrence of MOD or 28 days post injection, whichever comes first. If at most one subject experiences MOD, vaccinate another cohort of 3 subjects will be vaccinated. Vaccination will be suspended as soon as two or more subjects experiencing MOD are observed during the observation period. Vaccination will be paused if any subjects having UT or NRM events is observed during the observation period: from the vaccination to 28 days post injection. If at most 1 out of 6 evaluable subjects has MOD and the safety profile is acceptable (no UT and NRM are observed), the phase 2 segment will be started.

[0209] In the parallel phase 2 segment, a Simon two-stage design is used to determine the sample size, boundaries of immune responses, and whether accrual is suspended in a therapy type at interim analysis. Up to 37 subjects are treated in each therapy type in the phase 2 segment. Six subjects vaccinated in the safety-lead in segment will be counted as part of the first stage of the phase 2 design. A total of ˜40 patients in each therapy type will be accrued to account for an unevaluable rate of 8%. Immune responses are evaluated at interim analysis and final analysis in each arm.

[0210] FIG. 3 shows the design schema and FIG. 4 shows the treatment schema.

[0211] A comprehensive and innovative panel of immune assays combined with safe and versatile virological tools is designed to characterize the COH04S1 vaccine induced SARS-CoV-2-specific adaptive immunity in this clinical trial. The integrated platform of immune- and pseudovirus-based methods includes analytical multiparameter flow cytometry; qualitative in house developed ELISA, and neutralization assays based on a SARS-CoV-2 lentiviral-pseudovirus system, expressing the Spike antigen and infecting cell lines engineered to express ACE2. The assay system with Spike antigen “pseudotyped” onto non-replicative lentiviral particles alleviates the biosafety-level-3 (BSL3) hazard associated with working directly with SARS-CoV-2 and allows a safer approach to assess sera neutralizing activity to SARS-CoV-2.

[0212] Humoral immunity (IgA, IgG, and IgM) in serum is assessed by ELISA. The neutralizing capability of the antibodies to prevent infection of a susceptible cell line is evaluated using a pseudo-type of the SARS-CoV-2 virus. To evaluate the Th1 vs Th2 polarization of immune responses, which has been observed in convalescing COVID-19 cases, a SARS-CoV-2-specific ELISPOT is performed to measure IFNγ and IL-4 cytokine levels, by using overlapping peptide libraries specific for SARS-CoV-2. Additionally, the following are evaluated: a) levels of antigen-specific T cell responses using overlapping peptide library specific for SARS-CoV-2; and b) functional activated/cycling and memory phenotype marker evolution on the surface of antigen specific T cells elicited as a result of the vaccination.

### REFERENCES

[0213] The references, patents and published patent applications listed below, and all references cited in the specification above are hereby incorporated by reference in their entirety, as if fully set forth herein.
[0214] 1. Krause P R, Fleming T R, Longini I M, et al. SARS-CoV-2 Variants and Vaccines. N Engl J Med 2021; 385(2): 179-86.
[0215] 2. Edara V V, Pinsky B A, Suthar M S, et al. Infection and Vaccine-Induced Neutralizing-Antibody Responses to the SARS-CoV-2 B.1.617 Variants. N Engl J Med 2021; 385(7): 664-6.
[0216] 3. Liu Y, Liu J, Xia H, et al. BNT162b2-Elicited Neutralization against New SARS-CoV-2 Spike Variants. N Engl J Med 2021; 385(5): 472-4.
[0217] 4. Lopez Bernal J, Andrews N, Gower C, et al. Effectiveness of Covid-19 Vaccines against the B.1.617.2 (Delta) Variant. N Engl J Med 2021; 385(7): 585-94.
[0218] 5. Chiuppesi F, Salazar M D, Contreras H, et al. Development of a multi-antigenic SARS-CoV-2 vaccine candidate using a synthetic poxvirus platform. Nat Commun 2020; 11(1): 6121.
[0219] 6. Volz A, Sutter G. Modified Vaccinia Virus Ankara: History, Value in Basic Research, and Current Perspectives for Vaccine Development. Adv Virus Res 2017; 97: 187-243.
[0220] 7. Aldoss I, La Rosa C, Baden L R, et al. Poxvirus Vectored Cytomegalovirus Vaccine to Prevent Cytomegalovirus Viremia in Transplant Recipients: A Phase 2, Randomized Clinical Trial. Ann Intern Med 2020; 172(5): 306-16.
[0221] 8. Chiuppesi F, Nguyen V H, Park Y, et al. Synthetic Multiantigen MVA Vaccine COH04S1 Protects Against SARS-CoV-2 in Syrian Hamsters and Non-Human Primates. bioRxiv 2021.
[0222] 9. Antoine G, Scheiflinger F, Dorner F, Falkner F G. The Complete Genomic Sequence of the Modified Vaccinia Ankara Strain: Comparison With Other Orthopoxviruses. Virology. 10 May 1998; 244(2):365-96.
[0223] 10. Scheiflinger F, Dorner F, Falkner F G. Construction of Chimeric Vaccinia Viruses by Molecular Cloning and Packaging. Proceedings of the National Academy of Sciences of the United States of America. 1 Nov. 1992; 89(21):9977-81.
[0224] 11. Liang, W., W. Guan, R. Chen, W. Wang, J. Li, K. Xu, C. Li, Q. Ai, W. Lu, H. Liang, S. Li, and J. He. 2020. Cancer patients in SARS-CoV-2 infection: a nationwide analysis in China. Lancet Oncol 21: 335-337.
[0225] 12. Sanders, J. M., M. L. Monogue, T. Z. Jodlowski, and J. B. Cutrell. 2020. Pharmacologic Treatments for Coronavirus Disease 2019 (COVID-19): A Review. JAMA.
[0226] 13. Dagnew, A. F., O. Ilhan, W. S. Lee, D. Woszczyk, J. Y. Kwak, S. Bowcock, S. K. Sohn, G. Rodriguez Macias, T. J. Chiou, D. Quiel, M. Aoun, M. B. Navarro Matilla, J. de la Serna, S. Milliken, J. Murphy, S. A. McNeil, B. Salaun, E. Di Paolo, L. Campora, M. Lopez-Fauqued, M. El Idrissi, A. Schuind, T. C. Heineman, P. Van den Steen, L. Oostvogels, and g. Zoster-039 study. 2019. Immunogenicity and safety of the adjuvanted recombinant zoster vaccine in adults with haematological malignancies: a phase 3, randomised, clinical trial and post-hoc efficacy analysis. The Lancet. Infectious diseases 19: 988-1000.
[0227] 14. Rubin, L. G., M. J. Levin, P. Ljungman, E. G. Davies, R. Avery, M. Tomblyn, A. Bousvaros, S. Dhanireddy, L. Sung, H. Keyserling, I. Kang, and A. Infectious Diseases Society of. 2014. 2013 IDSA clinical practice guideline for vaccination of the immunocompromised host. Clinical infectious diseases: an official publication of the Infectious Diseases Society of America 58: 309-318.
[0228] 15. Alharbi, N. K., E. Padron-Regalado, C. P. Thompson, A. Kupke, D. Wells, M. A. Sloan, K. Grehan, N. Temperton, T. Lambe, G. Warimwe, S. Becker, A. V. S. Hill, and S. C. Gilbert. 2017. ChAdOx1 and MVA based vaccine candidates against MERS-CoV elicit neutralising antibodies and cellular immune responses in mice. Vaccine 35: 3780-3788.
[0229] 16. Walsh, S. R., M. B. Wilck, D. J. Dominguez, E. Zablowsky, S. Bajimaya, L. S. Gagne, K. A. Verrill, J. A. Kleinjan, A. Patel, Y. Zhang, H. Hill, A. Acharyya, D. C. Fisher, J. H. Antin, M. S. Seaman, R. Dolin, and L. R. Baden. 2013. Safety and immunogenicity of modified vaccinia Ankara in hematopoietic stem cell transplant recipients: a randomized, controlled trial. The Journal of infectious diseases 207: 1888-1897.
[0230] 17. La Rosa, C., J. Longmate, J. Martinez, Q. Zhou, T. I. Kaltcheva, W. Tsai, J. Drake, M. Carroll, F. Wussow, F. Chiuppesi, N. Hardwick, S. Dadwal, I. Aldoss, R. Nakamura, J. A. Zaia, and D. J. Diamond. 2017. MVA vaccine encoding CMV antigens safely induces durable expansion of CMV-specific T cells in healthy adults. Blood 129: 114-125.
[0231] 18. Crawford, K. H. D., R. Eguia, A. S. Dingens, A. N. Loes, K. D. Malone, C. R. Wolf, H. Y. Chu, M. A. Tortorici, D. Veesler, M. Murphy, D. Pettie, N. P. King, A. B. Balazs, and J. D. Bloom. 2020. Protocol and Reagents for Pseudotyping Lentiviral Particles with SARS-CoV-2 Spike Protein for Neutralization Assays. Viruses 12.
[0232] 19. Goonetilleke, N., S. Moore, L. Dally, N. Winstone, I. Cebere, A. Mahmoud, S. Pinheiro, G. Gillespie, D. Brown, V. Loach, J. Roberts, A. Guimaraes-Walker, P. Hayes, K. Loughran, C. Smith, J. De Bont, C. Verlinde, D. Vooijs, C. Schmidt, M. Boaz, J. Gilmour, P. Fast, L. Dorrell, T. Hanke, and A. J. McMichael. 2006. Induction of multifunctional human immunodeficiency virus type 1 (HIV-1)-specific T cells capable of proliferation in healthy subjects by using a prime-boost regimen of DNA- and modified vaccinia virus Ankara-vectored vaccines expressing HIV-1 Gag coupled to CD8+ T-cell epitopes. J Virol 80: 4717-4728.
[0233] 20. Robinson, H. L., D. C. Montefiori, F. Villinger, J. E. Robinson, S. Sharma, L. S. Wyatt, P. L. Earl, H. M. McClure, B. Moss, and R. R. Amara. 2006. Studies on G M-CSF DNA as an adjuvant for neutralizing Ab elicited by a DNA/MVA immunodeficiency virus vaccine. Virology 352: 285-294.
[0234] 21. Santra, S., Y. Sun, J. G. Parvani, V. Philippon, M. S. Wyand, K. Manson, A. Gomez-Yafal, G. Mazzara, D. Panicali, P. D. Markham, D. C. Montefiori, and N. L. Letvin. 2007. Heterologous prime/boost immunization of rhesus monkeys by using diverse poxvirus vectors. J Virol 81: 8563-8570.
[0235] 22. Ou, X., Y. Liu, X. Lei, P. Li, D. Mi, L. Ren, L. Guo, R. Guo, T. Chen, J. Hu, Z. Xiang, Z. Mu, X. Chen, J. Chen, K. Hu, Q. Jin, J. Wang, and Z. Qian. 27 Mar. 2020. Characterization of Spike Glycoprotein of SARS-CoV-2 on Virus Entry and Its Immune Cross-Reactivity With SARS-CoV. Nature communications 11: 1620.
[0236] 23. Tay, M. Z., C. M. Poh, L. Renia, P. A. MacAry, and L. F. P. Ng. 2020. The trinity of COVID-19: immunity, inflammation and intervention. Nat Rev Immunol 20: 363-374.
[0237] 24. Sekine, T., A. Perez-Potti, S. Nguyen, J. B. Gorin, V. H. Wu, E. Gostick, S. Llewellyn-Lacey, Q. Hammer, S. Falck-Jones, S. Vangeti, M. Yu, A. Smed-Sorensen, A. Gaballa, M. Uhlin, J. K. Sandberg, C. Brander, P. Nowak, P. A. Goepfert, D. A. Price, M. R. Betts, and M. Buggert. 2020. TOX is expressed by exhausted and polyfunctional human effector memory CD8(+) T cells. Sci Immunol 5.
[0238] 25. Epker, J. L., A. J. Valkenburg, and E. J. O. Kompanje. 2021. Double data and dubious conclusions, ‘Houston do we have a problem?’. Intensive Care Med.
[0239] 26. Bagarazzi, M. L., J. Yan, M. P. Morrow, X. Shen, R. L. Parker, J. C. Lee, M. Giffear, P. Pankhong, A. S. Khan, K. E. Broderick, C. Knott, F. Lin, J. D. Boyer, R. Draghia-Akli, C. J. White, J. J. Kim, D. B. Weiner, and N. Y. Sardesai. 2012. Immunotherapy Against HPV16/18 Generates Potent TH1 and Cytotoxic Cellular Immune Responses. Science translational medicine 4.
[0240] 27. Wolfl, M., M. Eyrich, P. Schlegel, and P. Greenberg. 2007. T-cells in stem cell transplants: dissecting the good, the bad and the ugly. Journal of stem cells & regenerative medicine 2: 26.

The application's sequence listing, which the Patent Office published only in electronic form, follows.

SEQUENCE LISTING (33 sequences)

SEQ ID NO: 1 - DNA, 166605 bp, synthetic construct
  source 1..166605: mol_type = other DNA
ttttatgagaccatcaaagagagaaagagaataaaaatattttttatgagaccatcaaagagagaaagagaataaaaatattttatgagaccatcaaagagagaaagagaataaaaatattttttatgagaccatcaaagagagaaagagaataaaaatattttatgagaccatcaaagagagaaagagaataaaaatattttttatgagaccatcaaagagagaaagagaataaaaatatttttgtatgagaccatcagaaagaggtttaatatttttgtgataccctgaaaggaaataggaatagtgtcataatcgtatcacactattgagacagaaaaagaagaagtcgcgagaggtaactttttgttttgcaaaccggaatatagtgtccggtacacttttttaattcgtggtgtgcctgaatcgttcgattaaccctactcatccaatttcagatgaatagagttatcgattcagacacacgctttgagttttgttgaatcgatgagtgaagtatcatcggttgcaccttcagatgccgatccgtcgacatacttgacctcaagttcagatgattccttgcacatgtctccgatacgaacgctaaactctagattcttgacacattttgtatcgacgatcgttgaaccgatgatatcttcgtaactcactttcttatgagagatgttagacccgagtactggatgggtcttgatgtcgctgtctttctcttcttcgctacatctgatgtcgatagacacctcacagtctttccatcagcggattctgagatggatttaatctgaggacatttggtgaatccaaagttcattctcagacctccaccgatgatggagtaataagtggtaggaggatctacatcctcgactgattccacctcgggatctggatctgactcggactctgtaatttccgttacggattggcaaatcttatcatcggtcggtgtttggtcttgctttgtgactttgataataacatcgattcccatatgatgtttgttttcttcttccgtacacgatgaggatgattgctgaagactggcaggcacatgcatgccagtacgatatattgtttcatgattgctattgattgagtactgttctttatgattctacttccttaccgtgcaataaattagaatatattttctacttttacgagaaattaattattgtatttatgggtgaaaaacttactataaaaagcgggtgggtttggaattagtgatcagtttatgtatatcgcaactaccgggcatatggctacattacccacatgataagagattgtatcagtttcgtagtcttgagtattggtattactatatagtatatagatgtcgacgctagagttactgtctccgaatgcggcatgatagtatcattctttgctttcgttaactgtttggaggaagaatctttgttattgcatttaatctcgaaattcagagtgcacacctttctcctgtaaagaaacctgaagtcgctaccttattaagaagacgggatcgcagtctttatgattcatagtaatagttagttccgacgttgagatggattcgctgagaccggtagtggtcgtccgagtacacgatgtgtcgttaactggatacaggttaatttccacatcgatatagttaaaggtatttctgggtacgggttcgcatttatctgcggaagagacggtgtgagaatatgttccgagaccacacggagaacagatgacgtctccggatactccgtatcctattccacattttgtttgggaaacacatgccttgcatccatgatcgggagagcattcacagattctattgtgagtcgtgttacacgatcgcgtcgacattgttgacagaaacgtgaccttcattcttaccgtcgtccataaatacgttaggtatgtaccacatactgtcgcgaacgatgcgtccatctcataatgatttactttttcataattaaagatgtgaaagaaaaccgaacaatatatttttttagtaatgtttatgcgagacatataaaataaactccgtgtttatgatgccggtaaatgtttttatcatcttggacggaatcgattttgtaatatgccatggaaacaggacattatcactccatgataaattatttaatggagtcgatcctctcattgttctttgcgtatctcaatctgtggcgtttgcttcgtttaaataatatatcaaacatggagacgcctgatatgtaggcattcttcattctattaatgtctgctctatagcgctttagttccttatgacgaccggcgatatcatacttactttagaaggaaaatcatcatctaggattaaggcgtatctgatacaggcgaataatggttcaggatatagatagcgtatatctctattaaatgcgtcaatcatagtctctagagtgggatggtaactcagtaataaatcaactagcttctctttggtaactgcttttctggatggccgtattgattatcgagcgtgacactcgctccatattccaataaccgctttgcaaattgtatattattgacatcgaccgcgtaatatagtagagttatcgatcatatctatatcatccatgtacttgcttagtatatcaaatacatcttcataacagtgatacccgcaattattaaatctcgataatatcagaccgtacatacatagacggccattgttagatatgtgatttacagccgcgtgtccatattttccacgataaaccttacgacgtttacatcgacgagattattattaacaaagttgttgtccgtcgtcttatccaacatgcattgaatgataggtatacttaccatatcgccgtaatgtaagtagtttatcagtatggcttgtacgatggattcatcctgttgtctaaatctctttagaatgttatcgatgatgtagtggttatattctctggaatcgtacgaagtaatactacgcattacgtcgacaagagtatgacgtctctcaataagaagattaacgatttccatgtctacattatatggggttactctaaatcgcttgtttagataatacgcctctaatatagggctgacgtcgtatactctacacgtgtccacatcctttattaataatctctatatctatggttgagcaagaccagtagtattggatggaaacattgttatcgatcaaacatttaattacatccttggatagagattctctatgagacgatatatagtaatgaagagagttcttacacatatcactgttgtacatacaggtacgaaatacgtaaccggtgctgtaacattctgatttaagaagccatagcaatacttctggtctcggattaggcgtcgttacgtatatatccaccaatccgagaccattgattgcataattcgtattcttggacggacgtatccgtttatccacaattaggtattttagcagacgtaagtcgaaatcatttatattcgacttgagttcgttagaggaattcgaatagctggatatcagtagatgcacaatctgagattttacgtatctatgcttactgtatgctcctagcggagttaatccttcgttgtttctacaaagtctctcgactccgcgagagagtaacagtcgaacaatcttaatgtctgtatcgcatttattggagacgtaacaatgtagcgcattgtttcctcgtctatctatatgttttgataagttgtgacacgtttcaatttctagttttatttttttgtacgtcacatcttcatccagtagacgacatagaatacatgtgcaatccatagctattctggtgctaattattcctcataagatgataaaaagtgtagtgagagagcatgaaggagatttagtatttagcagtgcggatatgatccaagagggtgagatagtcgttctcgttcagaatctttcgcagcataagtagtatgtcgatatacttatcgttgaagactcttccagagacgatagctgattgagtacaaagtccaatgattgcacgaagttcttcggcggttttcatggagtcatttctgatgaaacatttaatgatctaaatttcagtttatgtttgtaccccgtattcatacttaacaaattggtattacataccattaataatgcaagcataaaaaatcgttagtagatgtttctaaatataggttccgtaagcaaagaatataagaatgaagcggtaatgataaaatcaatcgttatctaaaatgatcatactcatttattttattctattatattaacacatacatttttaacagcaacacattcaatattgtattgttatttttatattatttacacaattaacaatatattattagtttatattactgaattaataatataaaattcccaatcttgtcataaacacacactgagaaacagcataaacacaaaatccatcaaaaatgttgataaattatctgatgttgttgttcgctgctatgataatcagatcattcgccgatagtggtaacgctatcgaaacgacatcgccagaaattacaaacgctacaacagatattccagctatcagattatgcggtccagagggagatggatattgtttacacggtgactgtatccacgctagagatatcgacggtatgtattgtagatgctctcatggttatacaggcattagatgtcagcatgtagtattagtagactatcaacgttcagaaaaaccaaacactacaacgtcatatatcccatctcccggtattatgcttgtattagtaggcattattattattacgtgttgtctattatctgtttataggttcactcgacgaactaaactacctatacaagatatggttgtgccataatttttataaattttttttatgagtatttttacaaaaatgtataaagtgtatgtcttatgtatatttataaaaatgctaaatatgcgatgtatctatgttatttgtatttatctaaacaatacctctacctctagatattatacaaaaattttttatttcggcatattaaagtaaaatctagttaccttgaaaatgaatacagtgggtggttccgtatcaccagtaagaacataatagtcgaatacagtatccgattgagattttgcatacaatactagtctagaaagaaatttgtaatcatcttctgtgacgggagtccatatatctgtatcatcgtcccatgctatattcctgttatcatcattagttaatgaaaataactctcgtgcttcagaaaagtcaaatattgtatccatacatacatctccaaaactatcgcttatacgtttatctttaacgatacctatacctagatggttatttactaacagacattttccagatctattgactataactcctatagtttccacatcaaccaagtaatgatcatctattgttatataacaataacataactcttttccgtttttatcagtatgtatatctatatcaacgtcgtcgttgtagtgaatagtagtcattgatctattatatgaaacggatatgtctagaacggcaattgttttacgtccagttaacactttcgttgatttaaagtctagagtctttgcaaacataatatccttatccgactttatatttcctgtagggtggtataattttattttgcctccacatatcggtgtttccaaatatattactagacaatattccatatagttattagttaagggtacccaattagaacacgtacgcttattatcatcatttggatcgtatttcataaaagttattgtactatcgatgtcaacacattctacattttttaatcgtctatatagtatttttctgatattttctataatatcagaattgtcttccatcggaagttgtatactatcggaatcagttacatgtttaaataattctctgatgtcattccttatacaatcaaattcattattaaacagtttaatagtctgtagacctttatcgtcgtaaatatccattgtcttattagttacgcttatttttatgtgtttttacgttgctttattatattttataagaatgattgtttgacgaatcacgagaactattaagacacattattaggtatatattataaaaaagtttttgattacgatgttataagaggaaagaggacacattaacatcatacatcaattaactacattcttataacatcgtaatcaaaagaattgcaattttgatgtataacaactgtcaatgggttatggaattgtatattacatattatacggtatgttggtaacgacaaataccgatcggtaattgtctgccggtgtaatagaattatatatatctatctattacaccggccttgtatacataataataagttgtggtagtatgatctccatatttataatttaggactttgtattcagtttttttggaatcataaaaaataaaaaaaagttttactaatttaaaattatttacatttttttcactgtttagtcgcggatatggaattcgatcctgccaaaatcaatacatcatctatagatcatgtaacaatattacaatacatagatgaaccaaatgatataagactaacagtatgcattatcacaaaaataaatccacatttggctaatcaatttcgggcttggaaaaaacgtatcgccggaagggactatatgactaacttatctagagatacaggaatacaacaatcaaaacttactgaaactgtcaaaaaaatagaaacatatatggtctatatatacactacaatttagttattaattggataaccgatgtgattatcaatcaatattaagaaggttggtaaattggtacatagctaataatacctatacacccaataatacaacaaccatttctgagttggatatcatcaaaatactggataaatacgaggacgtgtatagagtaagtaaagaaaaagaatgtgaaatttgctatgaagttgtttactcaaaacgatagatactttggtttattggattcgtgtaatcatatattttgcataacatgcatcaatatatggcatagaacacgaagagaaaccggtgcgtcggataattgtcctatatgtcgtacccgttttagaaacataacaatgagcaagttaactaataaataaaaagtttaatttgttgacgacgtatgtcgttattttttctcgtataaaagattaatttgattctaatataatctttagtattggataaatatcaattcaaattaattccattagattatatcataaataaaaatagtagcacgcactacttcagccaaatattcttttttgaaacgccatctatcgtagtgaggacacaagtgaacctataatgagcaaatttattagtatcggttacatgaaggactttacgtagagtggtgattccactatctgtggtacgaacggtttcatcttctttgatgccatcacccagatgttctataaacttggtatcctttgccaaccaatacatatagctaaactcaggcatatgttccacacatcctgaacaatgaaattctccagaagatgttacaatgtctagatttggacatttggtttcaaccgcgttaacatatgagtgaacacacccatacatgaaagcgatgagaaataggattttcatcttgccaaaatatcactagaaaaaatttatttatcaattttaaaggtataaaaaatacttattgttgctcgaatattttgtatttgatggtatacggaagattagaaatgtaggtattatcatcaactgattctatggttttatgtattctatcatgtttcactattgcgttggaaataatatcatatgcttccacatatattttattttgttttaactcataatactcacgtaattctggattattgacatatctatgaataattttagctccatgatcagtaaatattaatgagaacatagtattaccacctaccattatttttttcatctcattcaattcttaattgcaaagatctatataatcattatagcgttgacttatggactctggaatcttagacgatgtacagtcatctataatcatggcatatttaatacattgttttatagcatagtcgttatctacgatgttagatatttctctcaatgaatcaatcacacaatctaatgtaggtttatgacataatagcattttcagcagttcaatgtttttagattcgttgatggcaatggctatacatgtatatccgttatttgatctaatgttgacatctgaaccggattctagcagtaaagatactagagattgtttattatatctaacagccttgtgaagaagtgtttctcctcgtttgtcaatcatgttaatgtctttaagataaggtaggcaaatgtttatagtactaagaattgggcaagcataagacatgtcacaaagaccctttttgtatgtataagtgtaaaaattataacattcatagttggatttacataggtgtccaatcgggatctctccatcatcgagataattgatggcatctcccttccttttttagtagatatttcatcgtgtaagaatcaatattaatatttctaaagtatccgtgtatagcctctttatttaccacagttccatattccactagagggatatcgccgaatgtcatatactcaattagtatatgttggaggacatccgagttcattgttttcaatatcaaaaagatggtttccttatcatttctccatagtggtacaatactacacattattccgtgcggctttccattttccaaaaacaatttgaccaaatctacatctttattgtatctataatcactatttagataatcagccataattactcgagtgcaacatgttagatcgtctatatatgaataagccgtgttatctattcctttcattaacaatttaacgatgtctatatctatatgagatgacttaatataatattgaagagctgtacaatagtttttatctataaaagacggcttgattccgtgattaattagacatttaacaacttccggacgcacatatgctctcgtatccgactctgaatacagatgagagatgatatacagatgcaatacggtaccgcaatttcgtagttgataatcatcatacgcgtatcagtactcgtcctcataaagaacactgcagccattttctatgaacaaatcaataatttcaggaacaggatcatctgtcattacataattttctataactgaacgatggttttcacatttaacactcaagtcaaatccatgttctaccaacacctttatcaagtcaacgtctacatttttggatttcatatagctgaatatattaaagtcatttatgttgctaaatccagtggcttctagtagagccatcgctatatcctttaactttaacatgtctactatttgtgtattcttctaatggggtagctgtctccaatttttgcgtaatggattagtgccactgtctagtagtagtttgacgacctcgacattattacaatgctcattaaaaaggtatgcgtgtaaagcattattcttgaattggttcctggtatcattaggatctctgtctctcaacatctgtttaagttcatcgagagccacctcctcattttccaaatagtcaaacattttgactgaatgagctactgtgaactctatacacccacacaactaatgtcattaaatatcatgtcaaaaacttgtacaattattaataaaaataatttagtgtttaaattttaccagttccagattttacacctccgttaaccccactttttacaccactggacgatcctcctccccacattccaccgccaccagatgtataagttttagatcctttattactaccatcatgtccatggataaagacactccacatgccgccactaccccctttagaagacatattaataagacttaaggacaagtttaacaataaaattaatcacgagtaccctactaccaacctacactattatatgattatagtttctatttttacagtaccttaactaaagtctctagtcacaagagcaatactaccaacctacactattatatgattatagtttctatttttataggaacgcgtacgagaaaatcaaatgtctaatttctaacggtagtgttgataaacgattatcgtcaatggatacctcctctatcatgtcgtctattttcttactttgttctattaacttattagcattatatattatttgattataaaacttatattgcttattagcccaatctgtaaatatcggattattaacatatcgtttctttgtaggtttatttaacatgtacatcactgtaagcatgtccgtaccatttattttaatttgacgcatatccgcaatttctttttcgcagtcggttataaattctatatatgatggatacatgctacatgtgtacttataatcgactaatatgaagtacttgatacatattttcagtaacgatttattattaccacctatgaataagtacctgtgatcgtctaggtaatcaactgttttcttaatacattcgatggttggtaatttactcagaataatttccaatatcttaatatataattctgctatttctgggatatatttatctgccagtataacacaaatagtaatacatgtaaacccatattttgttattatattaatgtctgcgccattatctattaaccattctactaggctgacactatgcgacttaatacaatgataaagtatactacatccatgtttatatcatcaatatacggcttacaaagttttagtatcgataacacatccaactcacgcatagagaaggtagggaataatggcataatatttattaggttatcatcattgtcattatctacaactaagtttccattttttaaaatatactcgacaactttaggatctctattgccaaatttttgaaaatatttatttatatgcttaaatctatataatgtagctccttcatcaatcatacatttaataacattgatgtatactgtatgataagatacatattctaacaatagatcttgtatagaatctgtatatcttttaagaattgtggatattattacgtaaactattacacaattctaaaatataaaacgtatcacggtcgaataatagttgatcaactatataattatcgattttgtgatttttcttcctaaactgtttacgtaaatagttagatagaatattcattagttcatgaccactatagttactatcgaataacgcgtcaaatatttcccgtttaatatcgcatttgtcaagataataatagagtgtggtatgttcacgataagtataataacgcatctctttttcgtgtgaaattaaatagtttattacgtccaaagatgtagcataaccatcttgtgacctagtaataatataataatagagaactgttttacccattctatcatcataatcagtggtgtagtcgtaatcgtaattgtctaattcatcatcccaattataatattcaccagcacgtctaatctgttctattttgatcttgtatccatactgtatgttgctacatgtaggtattcctttatccaataatagtttaaacacatctacattgggatttgatgttgtagcgtatttttctacaatattaataccatttttgatactatttatttctatacctttcgaaattagtaatttcaataagtctatatcgatgttatcagaacatagatattcgagtatatcaaaatcattgatatttttatagtcgactgacgacaataacaaaatcacaacatcgtttttgatattattatttttcttggtaacgtatgcctttaatggagtttcaccatcatactcatataatggatttgcaccactttctatcaatgattgtgcactgctggcatcgatgttaaatgttttacaactatcatagagtatcttatcgttaaccatgattggttgttgatgctatcgcattttttggtttctttcatttcagttatgtatggatttagcacgtttgggaagcatgagctcatatgatttcagtactgtagtgtcagtactattagtttcaataagatcaatctctagatctatagaatcaaaacacgataggtcagaagataatgaatatctgtaggcttcttgttgtactgtaacttctcgttttgttagatgtttgcatcgtgctttaacatcaatggtacaaattttatcctcgctttgtgtatcatattcgtccctactataaaattgtatattcagattatcatgagatgtgtatacgctaacggtatcaataaacggagcacaccatttagtcataaccgtaatccaaaaatttttaaagtatatcttaacgaaagaagttgtgtcattgtctacggtgtatggtactagatcctcataagtgtatatatctagagtaatgtttaatttatcaaatggttgataatatggatcctcatgacaatttccgaagatggaaatgagatatagacatgcaataaatctaattgcggacatggttactccttaaaaaaatacgaataatcaccttggctatttagtaagtgtcatttaacactatactcatattaatccatggactcataatctctatacgggattaacggatgttctatatacggggatgagtagttttcttctttaactttatactttttactaatcatatttagactgatgtatgggtaatagtgtttaaagagttcgttctcatcatcagaataaatcaatatctctgtttttttgttatacagatgtattacagcctcatatattacgtaatagaacgtgtcatctaccttattaactttcaccgcatagttgtttgcaaatacggttaatcctttgacctcgtcgatttccgaccaatctgggcgtataatgaatctaaactttaatttcttgtaatcattcgaaataatttttagtttgcatccgtagttatcccctttatgtaactgtaaatttctcaacgcgatatctccattaataatgatgtcgaattcgtgctgtatacccatactgaatggatgaacgaataccgacggcgttaatagtaatttactttttcatctttacatattgggtactagttttactatcataagtttataaattccacaagctactatggaataagccaaccatcttagtataacacacatgtcttaaagtttattaattaattacatgttgttttatatatcgctacgaatttaaacagagaaatcagtttaggaaaaaaaaatatctatctacatcatcacgtctctgtattctacgatagagtgctactttaagatgagacatatccgtgtcatcaaaaatatactccattaaaatgattattccggcagcgaacttgatattggatatatcacaacctttgttaatatctacgacaatagacagcagtcccatggttccataaacagtgagtttatctttctttgaagagatattttgtagagatcttataaaactgtcgaatgacatcgcatttatatctttagctaaatcgtatatgttaccatcgtaatatctaaccgcgtctatcttaaacgtttccatcgctttaaagacgtttccgatagatggtctcatttcatcagtcatactgagccaacaaatataatcgtgtataacatctttgatagaatcagactctaaagaaaacgaatcggctttattatacgcattcatgataaacttaatgaaaaatgtttttcgttgtttaagttggatgaatagtatgtcttaataattgttattatttcattaattaatatttagtaacgagtacactctataaaaacgagaatgacataactagttatcaaagtgtctaggacgcgtaattttcatatggtatagatcctgtaagcattgtctgtattctggagctattttctctatatctaatttctgaacgttcaccaatgtctctagccactttggcactaatagcgatcattcgcttagcgtcttctatattattaactggttgattcaatctatctagcaatggaccgtcggacagcgtcattctcatgttcttaatcaatgtacatacatcgccgtcatctaccaattcatccaacaacataagctttttaaaatcatcattataataggtttgatcgttgtcatttctccaaagaatatatctaataagtagagtcctcatgattagttaacaactattttttatgttaaatcaattagtacaccgctatgtttaatacttattcatattttagtttttaggattgagaatcaatacaaaaattaatgcatcattaattttagaaatacttagtttccacgtagtcaatgaaacatttgaactcatcgtacaggacgttctcgtacaggacgtaactataaaccggtttatatttgttcaagatagatacaaatccgataactttttttacgaattctacgggatccactttaaaagtgtcataccgggttctttttatttttttaaacagattaatggtgtgatgttgattaggtcttttacgaatttgatatagaatagcgtttacatattctccataatggtcaatcgccatttgttcgtatgtcataaattctttaattatatgacactgtgtattatttagttcatccttgttcatcattaggaatctatccaatatggcaattatactagaactataggtgcgttgtatacacatattgatgtgtctgtttatacaatccatgctactaccttcgggtaaaattgtagcatcatataccatttctagtactttaggttcattgttatccattgcagaggacgtcatgacgcatcctaaaaaaatatattatttttatgttattttgttaaaaataatcatcgaatacgaatcatccagtccactgaatagcaaaatctttactattttggtatcttccaatgtggctgcctgatgtaatggaaattcattctctagaagatttttcaatgctccagcgttcaacaacgtacatactagacgcacgttattatcagctattgcataatacaaggcactatgtccatggacatccgccttaaatgcatctttgctagagagaaagcttttcagctgcttagacttccaagtattaattcgtgacagatccatgtctgaaacgagacgctaattagtgtataatttttgtcatattgcaccagaattaataatatctctaatagatctgattagtagatacatggctatcgcaaaacaacatatacacatttaataaaaataatatttattaagaaaattcagatttcacgtacccatcaatataaataaaataatgattccttacaccgtacccatattaaggagattctaccttacccataaacaatataaatccagtaatatcatgtctgatgatgaacacaaatggtgtattaaattccagtttttcaggagatgatctcgccgtagctaccataatagtagatgcctctgctacagttccttgttcgtcgacatctatctttgcattctgaaacattttataaatatataatgggtccctagtcatatgtttaaacgacgcattatctggattaaacatactaggagccatcatttcggctatcgacttaatatccctcttattttcgatagaaaatttagggagtttaagattgtacactttattccctaattgaaacgaccaatagtctaattttgcagccgtaatagaatctgtgaaatgggtcatattatcacctattgccaggtacatactaatattagcatccttatacggaaggcgtaccatgtcatattctttgtcatcgattgtgattgtatttccttgcaatttagtaactacgttcatcatgggaaccgttttcgtaccgtacttattagtaaaactagcattgcgtgttttagtgatatcaaacggatattgccatatacctttaaaatatatagtattaatgattgcccatagagtattattgtcgagcatattagaatctactacattagacataccggatctacgttctactatagaattaattttattaaccgcatctcgtctaaagtttaatctatataggccgaatctatgatattgttgataatacgacggtttaatacacacagtattatctacgaaactttgataagttagatcagtgtacgtatatttagatgttttcagcttagctaatcctgatattaattctgtaaatgctggacccagatctctttttctcaaatccatagtcttcaataattctattctagtattacctgatgcaggcaatagcgacataaacatagaaaacgaataaccaaacggtgagaagacaatattatcatcttgaatatttttatacgctactataccggcattggtaaatccttgtagacgataggtagacgctgaacacgttaacgatagtatcaataacgcaatcatgattttatggtattaataattaaccttatttttatgttcggtataaaaattattgatgtctacacatccttttgtaattgacatctatatatccttttgtataatcaactctaatcactttaacttttacagttttccctaccagtttatccctatattcaacatatctatccatatgcatcttaacactctctgccaagatagcttcagagtgaggatagtcaaaaagataaatatatagagcataatcattctcgtatactctgccctttattacatcgcccgcattgggcaacgaataacaaaatgcaagcatcttgttaacgggctcgtaaattgggataaaaattatgtttttatatctattttattcaagagaatattcaggaatttctttttccggttgtatctcatcgcagtatatatcatttgtacattgtttcatattttttaatagtttacaccttttagtaggactagtatcgtacaattcatagctgtattttgaattccaatcacgcataaaaatatcttctaattgttgacgaagacctaatccatcatccggtgtaatattaatagatgctccacatgtatccgtaaagtaatttcctgtccaatttgaggtacctatataggccgttttatcggttaccatatatttggcatggtttaccctagaatacggaatgggaggatcagcatctggtacaataaatagctttacttctatatttatgtttttagattttagcatagcgatagatcttaaaaagtttctcatgataaacgaagatcgttgccagcaactaatcaatagcttaacggatacttgtctgtctatagcggatcttcttaattcatcttctatataaggccaaaacaaaattttacccgccttcgaataaataatagggataaagttcataacagatacataaacgaatttactcgcatttctaatacatgacaataaagcggttaaatcattggttctttccatagtacatagttgttgcggtgcagaagcaataaatacagagtgtggaacaccacttacgttaatactaagaggatgatctgtattataatacgacggataaaagtttttccaattatatggtagattgttaactccaagataccagtatacctcaaaaatttgagtgagatccgctgccaagttcctattattgaagatcgcaatacccaattctttgacctgagttagtgatctccaatccatgttagcgcttcctaaataaatatgtgtattatcagatatccaaaattttgtatgaagaactcctcctaggatatttgtaatatctatgtatcgtacttcaactccggccatttgtagtctttcaacatcctttaatggtttgttagatttattgacggctactctaactcgtactcctcttttgggtaattgtacaatctcgtttaatattatcgtgccgaaattcgtacccacttcatccgataaactccaataaaaagatgatatatctagtgtttttgtggtattggatagaatttccctccacatgttaaatgtagacaaatatactttatcaaattgcatacctataggaatagtctctgtaatcactgcgattgtattatccggattcattttatttgttaaaagaataatcctatatcacttcactctattaaaaatccaagtttctatttctttcatgactgattttttaacttcatccgtttccttatgaagatgatgtttggcaccttcataaatttttatttctctattacaatttgcatgttgcatgaaataatatgcacctaaaacatcgctaatctcattgtttgttccctggagtatgagagtcggggtgttaatcttggaaattatttttctaaccttgttggtagccttcaagacctgactagcaaatccagccttaattttttcatgattgattaatgggtcgtattggtatttataaactttatccatatctctagatactgattctggacatagctttccgactggcgcatttggtgtgatggttcccataagtttggcagctagcagattcagtcttgaaacagcatctgcattaactagaggagacattagaatcattgctgtaaacaagtttggattatcgtaagaggctagtatagaaattgttgctcccatggaatgacccaataagtagatttaatagttaccacgtgctgtaccaaagtcatcaatcatcattttttcaccattacttcttccatgtccaatatgatcatgtgagaatactaaaattcctaacgatgatatgttttcagctagttcgtcataacgtccagaatgtttaccagctccatgacttatgaatactaatgccttaggatatgtaatcattgtccagattgaacatacagtttgcactcatgattcacgttatataactatcaatattaacagttcgtttgatgatcatattatttttatgttttattgataattgtaaaaacatacaattaaatcaatatagaggaaggagacggctactgtcttttgtgagatagtcatggcgactaaattagattatgaggatgctgttttttactttgtggatgatgataaaatatgtagtcgcgactccatcatcgatctaatagatgaatatattacgtggagaaatcatgttatagtgtttaacaaagatattaccagttgtggaagactgtacaaggaattgatgaagttcgatgatgtcgctatacggtactatggtattgataaaattaatgagattgtcgaagctatgagcgaaggagaccactacatcaattttacaaaagtccatgatcaggaaagtttattcgctaccataggaatatgtgctaaaatcactgaacattggggatacaaaaagatttcagaatctagattccaatcattgggaaacattacagatctgatgaccgacgataatataaacatcttgatactttttctagaaaaaaaattgaattgatgatataggggtcttcataacgcataattattacgttagcattctatatccgtgttaaaaaaaattatcctatcatgtatttgagagttttatatgtagcaaacatgatagctgtgatgccaataagctttagatattcacgcgtgctagtgttagggatggtattatctggtggtgaaatgtccgttatataatctacaaaacaatcatcgcatatagtatgcgatagtagagtaaacatttttatagtttttactggattcatacatcgtctacccaattcggttatgaatgaaattgtcgccaatcttacacccaaccccttgttatccattagtatagtattaacttcgttatttatgtcataaactgtaaatgattttgtagatgccatatcatacatgatattcatgtccctattataatcattactaactttatcacaatatatgttgataatatctatatatgatctagtctttgtgggcaactgtctatacaagtcgtctaaacgttgtttactcatatagtatcgaacagccatcattacatggtcccgttccgttgatagataatcgagtatgttagtggacttgtcaaatctatataccatattttctggaagtggatatacatagtcgtgatcaacattattgctagcctcatcttctatatcctgtactataccatctacataatctacgatattattacacataaacatcgacaacatactattgtttattatctaagtcctgttgatccaaacccttgatctcctctatttgtactatctagagattgtacttcttccagttctggataatatatacgttgatagattagctgagctattctatctccagtatttacattaaacgtacattttccattattaataagaatgactcctatgtttcccctataatcttcgtctattacaccacctcctatatcaatgccttttagtgacagaccagacctaggagctattctaccatagcaaatcttaggcatggacatactaatatctgtcttaattaactgtctttctcctggagggatagtataatcgtaagcgctatacaaatcatatccggcagcacccggcgattgcctagtaggagatttagctctgttagtttccttaacaaatctaactggtgagttaatattcatgttgaacataaaactaatattttatttcaaaattatttaccatcccatatattccatgaataagtgtgatgattgtacacttctatagtatctatatacgattcacgataaaatcctcctatcaatagcagtttattatccactatgatcaattctggattatccctcggataaataggatcatctatcagagtccatgtattgctggattcacaataaaattccgcatttctaccaaccaagaataaccttctaccgaacactaacgcgcatgatttataatgaggataataagtggatggtccaaactgccactgatcatgattgggtagcaaatattctgtagttgtatcagtttcagaatgtcctcccattacgtatataacattgtttatggatgccactgctggattacatctaggtttcagaagactcggcatattaacccaagcagcatccccgtggaaccaacgctcaacagatgtgggatttggtagacctcctactacgtataatttattgttagcgggtatcccgctagcatacagtctggggctattcatcggaggaattggaatccaattgtttgatatataatttacagctatagcattgttatgtatttcattgttcatccatccaccgatgagatatactacttctccaacatgagtacttgtacacatatggaatatatctataatttgatccatgttcataggatactctatgaatggatacttgtatgatttgcgtggttgtttatcacaatgaaatattttggtacagtctagtatccattttacattatttatacctctgggagaaagataatttgacctgattacatttttgataaggagtagcagatttcctaatttatttcttcgctttatataccacttaatgacaaaatcctcatctggaacatttagttcatcgctttctagaataagtttcatagatagataatcaaaattgtctatgatgtcatcttccagttccaaaaagtgtttggcaataaagtttttagtatgacataagagattggatagtccgtattctatacccatcatgtaacactcgacacaatattcctttctaaaatctcgtaggataaagtttatacaagtgtagatgataaattctacagaggttaatatagaagcacgtaataaattgacgacgttatgactatctatatatacctttccagtatatgagtaaataactatagaagttagactgtgaatgtcaaggtctagacaaaccctcgtaactggatctttatttttcgtgtatttttgacgtaaatgtgtgcgaaagtaaggagataactttttcaatatcgtagaattgactattatattgcctcctatggcatcaataattgttttgaatttcttagtcatagacaatgctaatatattcttacagtacacagtattgacaaatatcggcatttatgtttctttaaaagtcaacatctaaagaaaaatgattatcttcttgagacataactcccattttttggtattcacccacacgtttttcgaaaaaattagttttaccttctaatgatatattttccatgaaatcaaacggattggtaacattataaatttttttaaatcccaattcagaaatcaatctatccgcgacgaattctatatatgttttcatcatttcacaattcattcctataagtttaactggaagagccgcagtaagaaattcttgttcaatggataccgcatctgttataatagatctaacggtttcttcactcggtggatgcaataaatgtttaaacatcaaacatgcgaagtcgcagtgtagaccctcgtctctactaatcaattcgttggaaaacgtgagtccgggcattaggccacgctttttaagccaaaatatggaagcgaatgatccggaaaagaagattccttctactgcagcaaaggcaataagtctctctccataaccggcgctgtcatgtatccacttttgagcccaatcggccttcttttttacacaaggcatcgtttctatggcattaaagagatagtttttttcattactatctttaacataagtatcgatcaaaagactatacatttccgaatgaatgttttcaatggccatctgaaatccgtagaaacatctagcctcggtaatctgtacttctgtacaaaatcgttccgccaaattttcattcactattccgtcactggctgcaaaaaacgccaatacatgttttataaaatatttttcgtctggtgttagtttattccaatcattgatatctttagatatatctacttcttccactgtccaaaatgatgcctctgcctttttatacatgttccagatgtcatgatattggattgggaaaataacaaatctatttggatttggtgcaaggatgggttccataactaaattaacaataacaataaattttttttcagttatctatatgcctgtacttggatcttttgtacatcgatatcgccgcaatcactacaataattacaagtattattgatagcattgttattagtactatcataattaaattatcgttattatcattttgtaattgtgacatcatactagataaatcgtttgcgagattgttgtgggaagcgggcatggaggatgaattatcgttattattatttaaagcctcccattcggattcacaaatatggcgcgcgttcaacattttatggaaacagataacaagaaaactcgtcatcgttcaaatttttaacgatagtaaaccgattaaacgtcgagctaatttctaacgctagcgactctgttggatatgggtttccagatatatatcttttcagttcccctacgtatctataatcatctgtaggaaatggaagatatttccatttatctactgttcctaatatcatatgtggtggtgtagtagaaccattaagcgcgaaagatgttatttcgcatcgtattttaacttcgcaataatttctggttagataacgcactctaccagtcaagtcaatgatattagcctttacagatatattcatagtagtcgtaacgatgactccatcttttagatgcgatactcctttgtatgtaccagaatcttcgtacctcaaactcgatatatttaaacaagttaatgagatattaacgcgttttatgaatgatgatatataaccagaagttttatcctcggtggctagcgctataaccttatcattataataccaactagtgtgattaatatgtgacacgttagtgtgggtacaaatatgtacattatcgtctacgtcgtattcgatacatccgcatacagccaacaaatataaaatgacaaatactctaacgccgttcgtacccatcttgatgcggtttaataaatgttttgatttcaatttattgtaaaaaaagattcggttttatactgttcgatattctcattgcttatattttcatctatcatctccacacagtcaaatccgtggttagcatgcacctcatcaaccggtaaaagactatcggactcttctatcattataactctagaatatttaatttggtcattattaatcaagtcaattatcttatttttaacaaacgtgagtattttactcattttttataaaaacttttagaaatatacagactctatcgtgtgtctatatcttctttttatatccaatgtatttatgtctgatttttcttcatttatcatatataatggtccaaattctacacgtgcttcggattcatccagatcattaaggttcttataattgtaacatccttctcttccctcttctacatcttccttcttattcttattcttagcgtcacagaatctaccacagcaggatcccatgacgagcgtcatattaaactaatccattttcaattataatatacgattagtaatgaccattaaaataaaaatattcttcataaccggcaagaaagtgaaaagttcacattgaaactatgtcagtagtatacatcatgaaatgatgatatatatatactctattttggtggaggattatatgatataattcgtggataatcattcttaagacacatttcttcattcgtaaatcttttcacgttaaatgagtgtccatattttgcaatttcttcatatgatggcggtgtacgtggacgaggctgctcctgttcttgttgtagtcgccgactgtcgtgtctgcgtttagatccctccattatcgcgattgcgtagatggagtactattttataccttgtaattaaatttttttattaattaaacgtataaaaacgttccgtatctgtatttaagagccagatttcgtctaatagaacaaatagctacagtaaaaataactagaataattgctacacccactagaaaccacggatcgtaatacggcaatcggttttcgataataggtggaacgtatattttatttaaggacttaacaattgtctgtaaaccacaatttgcttccgcggatcctgtattaactatctgtaaaagcatatgttgaccgggcggagccgaacattctccgatatccaatttctgtatatctataatattattaacctccgcatacgcattacagttcttttctagcttggataccgcactaggtacatcgtctagatctattcctatttcctcagcgatagctcttctatccttttccggaagcaatgaaatcacttcaataaatgattcaaccatgagtgtgaaactaagtcgagaattactcatgcatttgttagttattcggagcgcgcaatttttaaactgtcctataacctctcctatatgaatagcacaagtgacattagtagggatagaatgttgagctaatttttgtaaataactatctataaaaagattatacaaagttttaaactctttagtttccgccatttatccagtctgagaaaatgtctctcataataaatttttccaagaaactaattgggtgaagaatggaaacctttaatctatatttatcacagtctgttttggtacacatgatgaattcttccaatgccgtactaaattcgatatctttttcgatttctggatatgtttttaataaagtatgaacaaagaaatggaaatcgtaataccagttatgtttaactttgaaattgttttttattttcttgttaatgattccagccacttgggaaaagtcaaagtcgtttaatgccgatttaatacgttcattaaaaacaaactttttatcctttagatgaattattattggttcattggaatcaaaaagtaagatattatcgggtttaagatctgcgtgtaaaaagttgtcgcagcatggtagttcgtaaattttaatgtataacagagccatctgtaaaaagataaactttatgtattgtaccaaagatttaaatcctaatttgatagctagctcggtatctactttatctgccgaatacagtgctaggggaaaaattataatatttcctctttcgtattcgtagttagttctcttttcatgttcgaaaaagtgaaacatgcggttaaaatagtttataacattaatattactgttaataactgccggataaaagtgggatagtaatttcacgaatttgatactgtcctttctctcgttaaacgcctttaaaaaaactttagaagaatatctcaatgatagttcctgaccatccatagtttgtatcaataatagcaacatatgaagaacacgtttatacagagtatgtaaaaatgttaatttatagtttaatcccatggcccacgcacacacgattaattttttttcatctccctttagattgttgtatagaaatttgggtactgtgaactccgccgtagtttccatgggactatataattttgtggcctcgaatacaaattttactacatagttatctatcttaaagactataccatatcctcctgtagatatgtgataaaaatcgtcgtttataggataaaatcgtttatccttttgttggaaaaaggatgaattaatgtaatcattctcttctatctttagtagtgtttccttattaaaattcttaaaataatttaacaatctaactgatggagcccaattttggtgtaaatctaattgggacattatattgttaaaatacaaacagtctcctaatataacagtatctgataatctatggggagacatccattgatattcaggggatgaatcattggcaacacccatttattgtacaaaaagccccaatttacaaacgaaagtccaggtttgatagagacaaactattaactattttgtctctgtttttaatttctttggtaatgaaattattcacaatatcagtatcttctttatctaccagagattttactaacttgataaccttggctgtctcattcaatagggtagtaatatttgtatgtgtgatattgatatcttttagaagtgattctttgatggtgccagcatacgaattacaataatgcagaaactcggttaacatgcaggaattatagtaagccaattccaattgttgcctgtgttgtattagagtgtcaatatgagcaatggtgtccttgcgtttctctgatagaatgcgagcagcgattttggcgttatcatttgacgatatttctggaatgacgaatcctgtttctactaactttttggtaggacaaagtgaaacaatcaagaagatagcttctcctcctatttgtggaagaaattgaactcctctagatgatctccttgacagatattggaccgaattacagaagtacctggaatgtaaagccctgaaaccccctcattttttaagcagattgttgccgtaaatcctgcactatgcccaagatagagagctcctttggtgaatccatctctatgtttcagtttaaccaagaaacagtcagctggtctaaaatttccatctctatctaatacagcatctaacttgatgtcaggaactatgaccggttatgttatatgtaacattgagtaaatccttaagttcataatcatcactgtcatcagttatgtacgatccaaacaatgtttctactggcatagtggatacgaagatgctatccatcagaatgtttccctgattagtattttctatatagctattcttctttaaacgattttccaaatcagtaactatgttcatttttttaggagtaggacgcctagccagtatggaagaggattttctagatcctctcttcaacatctttgatctcaatggaatgcaaaaccccatagtgtaacaaccaacgataaaaataatattgtttttcactttttataattttaccatctgactcatggattcattaatatctttataagagctactaacgtataattctttataactgaactgagatatatacaccggatctatggtttccataattgagtaaatgaatgctcggcaataactaatggcaaatgtataaaacaacgaaattatactagagttgttaaagttaatattttctatgagctgttccaataaattatttgttgtaactgcgttcaagtcataaatcatcttgatactatccagtaaaccgtttttaagttctggaatattattatcccattgtaaagcccctaattcgactatcgaatatcctgctctgatagcagtttcaatatcgacggacgtcaatactgtaataaaggtggtagtattgtcatcatcgtgataaactactggaatatggtcgttagtaggtacggtaactttacacaacgcgatatataactttccttttgtaccatttttaacgtagttgggacgtcctgcagggtattgttttgaagaaatgatatcgagaacagatttgatacgatatttgttggattcctgattatttactataatataatctagacagatagatgattcgataaatagagaaggtatatcgttggtaggataatacatccccattccagtattctcggatactctattaatgacactagttaagaacatgtcttctattctagaaaacgaaaacatcctacatggactcattaaaacttctaacgctcctgattgtgtctcgaatgcctcgtacaaggatttcaaggatgccatagattctttgaccaacgatttagaattgcgtttagcatctgatttttttattaaatcgaatggtcggctctctggtttgctaccccaatgataacaatagtcttgtaaagataaaccgcaagaaaatttatacgcatccatccaaataaccctagcaccatcggatgatattaatgtattattatagattttccatccacagttattgggccagtatactgttagcaacggtatatcgaatagattactcatgtaacctactagaatgatagttcgtgtactagtcataatatctttaatccaatctaagaaatttaaaattagattttttacactgttaaagttaacaaaggtattacccggatacgtggatatcatatatggtattggtccattatcagtaatagctccataaactgatacggcgatggtttttatatgtgtttgatctaacgaggaagaaattcgcgcccacaattcatctctagatatgtatttaatatcaaacggtaacacatcaatttcgggacgcgtatatgtttctaaatttttaatccaaatataatgatgacctatatgccctattatcatactgtcaactatagtacacctagagaacttacgatacatctgtttcctataatcgttaaattttacaaatctataacatgctaaaccttttgacgacaaccattcattaatttctgatatggaatctgtattctcaataccgtatcgttctaaagccagtgctatatctccctgttcgtgagaacgctttcgtataatatcgatcaacggataatctgaagtttttggagaataatatgactcatgatctatttcgtccataaacaatctagacataggaattggaggcgatgatcttaattttgtgcaatgagtcgtcaatcctataacttctaatattgtaatattcatcatcgacataacactatctatgttatcatcgtatattagtataccatgaccttcttcatttcgtgccaaaatgatatacagtcttaaatagttacgcaatatctcaatagtttcataattgttagctgttttcatcaaggtttgtatcctgtttaacatgatggcgttctatacgtttctattttttaaatttttaacgatttactgtggctagatacccaatctctctcaaatatttttttagcctcgcttacaagctgtttatctatactattaaaactgacgaatccgtgattttggtaatgggttccgtcgaaatttgccgaagtgatatgaacatattcgtcgtcgactatcaacaattttgtattattctgaatagtgaaaaccttcacagatagatcattttgaacacacaacgcgtctagacttctggcggttgccatagaatatacgtcgttcttatcccaattaccaactagaagtctgatcttaactcctctattaatggctgcttctataatggagttgtaaatgtcgggccaatagtagctattaccgtcgacacgtgtagtgggaactatggccaaatgttcaatatctatactagtcttagccgacttgagtttatcaataactacatcagtgtctagatctctagaatatcccaataggtgttccggagaatcagtaaagaacactccacctataggattcttaatatgatacgcagtgctaactggcagacaacaagccgcagagcataaattcaaccatgaattttttgcgctattaaaggctttaaaagtatcaaatcttctacgaagatctgtggccagcgggggataatcagaatatacacctaacgttttaatcgtatgtatagatcctccagtaaatgacgcgtttcctacataacatctttcattatctgacacccaaaaacaaccgagtagtagtcccacattattttttttatctatattaacggttataaaatttatatccgggcagtgactttgtagctctcccagatttcttttccctcgttcatctagcaaaactattattttaatccctttttcagatgcctcttttagtttatcaaaaataagcgctcccctagtcgtactcagaggattacaacaaaaagatgctatgtatatatatttcttagctagagtgataatttcgttaaaacattcaaatgttgttaaatgatcggatctaaaatccatattttctggtagtgtttctaccagcctacattttgctcccgcaggtaccggtgcaaatggccacatttagttaacataaaaacttatacatcctgttctatcaacgattctagaatatcatcggctatatcgctaaaattttcatcaaagtcgacatcacaacctaactcagtcaatatattaagaagttccatgatgtcatcttcgtctatttctatatccgtatccattgtagattgttgaccgattatcgagtttaaatcattactaatactcaatccttcagaatacaatctgtgtttcattgtaaatttataggcggtgtatttaagttggtagattttcaattatgtatcaatatagcaacagtagttcttgctcctccttgattctagcatcctcttcattattttcttctacgtacataaacatgtccaatacgttagacaacacaccgacgatggcggccgccacagacacgaatatgactaaaccgatgaccatttaaaaacccctctctagctttcacttaaactgtatcgattattcttttagaacatgtataatataaaaacattattctatttcgaatttaggcttccaaaaatttttcatccgtaaaccgataataatatatatagacttgttaatagtcggaataaatagattaatgcttaaactatcatcatctccacgattagagatacaatatttacattttttttgctgtttcgaaactttatcaatacacgttaatacaaacccaggaaggagatattgaaactgaggctgttgaaaatgaaacggtgaatacaataattcagataatgtaaaatcatgattccgtattctgatgatattagaactgctaatggatgtcgatggtatgtatctaggagtatctattttaacaaagcatcgatttgctaatatacaattatcattttgattaattgttattttattcatattcttaaaaggtttcatatttatcaattcttctacattaaaaatttccatttttaatttatgtagccccgcaatactcctcattacgtttcattttttgtctataatatccattttgttcatctcggtacatagattatccaattgagaagcgcatttagtagttttgtacattttaagtttattgacgaatcgtcgaaaactagttatagttaacattttattatttgataccctgatattaatacccctgccgttactattatttataactgatgtaatccacgtaacattggaattaactatcgatagtaatgcatcgacgcttccaaaattgtctattataaactcaccgataatttttttattacatgttttcatattcattaggattattaaatctttaatcttactacgattgtatgcgttgatattgcaagacgtcattctaaaagacggaggatctccatcaaatgccagacaatcacgtacaaagtacatggaaataggttttgttctattgcgcatcatagatttatatagaacacccgtagaaatactaatttgttttactctataaaatactaatgcatctatttcatcgttttgtataacgtctttccaagtgtcaaattccaaatttttttcattgatagtaccaaattcttctatctctttaactacttgcatagataggtaattacagtgatgcctacatgccgttttttgaaactgaatagatgcgtctagaagcgatgctacgctagtcacaatcaccactttcatatttagaatatatatatgtaaaaatatagtagaatttcattttgttttttttctatgctataaatgaattctcattttgcatctgctcatactccgttttatatcaataccaaagaaggaagatatctggttctaaaagccgttaaagtatgcgatgttagaactgtagaatgcgaaggaagtaaagcttcctgcgtactcaaagtagataaaccctcatcacccgcgtgtgagagaagaccttcgtccccttccagatgcgagagaatgaataacccaggaaaacaagttccgtttatgaggacggacatgctacaaaatatgttcgcggctaatcgcgataatgtagcttctagacttttgtcctaaaatacaattatatccttttcgatattaataaatccgtgtcgtccaggttttttatctctttcagtatgtgaatagataggtattttatctctattcatcatcgaatttaagagatccgataaacattgtttgtattctccagatgtcagcatctgatacaacaatatatgtgcacataaacctctggcacttatttcatgtaccttccccttatcactaaggagaatagtatttgagaaatatgtatacatgatattatcatgaattagatatacagaatttgtaacactctcgaaatcacacgatgtgtcggcgttaagatctaatatatcactcgataacacattttcatctagatacactagacattttttaaagctaaaatagtctttagtagtaacagtaactatgcgattattttcatcgatgatacatttcatcggcatattattacgcttaccatcaaagactataccatgtgtatatctaacgtattctagcatggttgccatacgcgcattaaacttttcaggatctttggatagatcttccaatctatctatttgagaaaacatttttatcatgttcaatagttgaaacgtcggatccactatatagatattatctataaagattttaggaactacgttcatggtatcctggcgaatattaaaactatcaatgatatgattatcgttttcatcttttatcaccatatagtttctaagatatgggattttacttaatataatattatttcccgtaataaattttattagaaatgccaaatctataagaaaagtcctcgaattagtttgaagaatatctatatcgccgtaccgtatatttggattaattagatatagagaatatgatccgtaacatatacaacttttattatggcgtctaagatattcttccatcaacttattaacatttttgactagggaagatacattatgacgtcccattacttttgccttgtctattactgcgacgttcatagaatttagcatatctcttgccaattcttccattgatgttacattataagaaattttagatgaaattacatttggagctttaatagtaagaactcctaatatgtccgtgtatgtggtcactaatacagattgtagttctataatcgtaaataatttacctatattatatgtttgagtctgtttagaaaagtagctaagtatacgatcttttatttctgatgcagatgtatcaacatcggaaaaaaatctttttttattcttttttactaaagatacaaatatgtctttgttaaaaacagttattttctgaatatttctagcttgtaattttaacatatgatattcgttcacactaggtactctgcctaaataggtttctataatctttaatgtaatattaggaaaagtattctgatcaggattcctattcattttgaggatttaaaactctgattattgtctaatatggtctcaacacaaactttttcacagagcgatagagtttttgataactcgtttttcttaagaaatataaaactactgtctccagagctcgctctatcttttattttatttaattcgatacaaactcctgatactggttcagaaagtaattcattaattttcagtcctttatagaagatatttaatatagataatacaaaatcttcagtttttgatatcgatctgattgatcctagaactagatatattaataacgtgctcattaggcagtttatggcagcttgataattagatatagtatattccagttcatatttattagataccgcattgcccagattttgatattctatgaattcctctgaaaataaatccaaaataactagacattctattttttgtggattagtgtactctcttccctctatcatgttcactactggtgtccacgatgataaatatctagagggaatataatatagtccataggatgccaatctagcaatgtcgaataactgtaattttattcttcgctcttcattatgaattgattcttgaggtataaacctaacacaaattatattattagacttttcgtatgtaatgtctttcatgttataagtttttaatcctggaatagaatctattttaatgaggcttttaaacgcagagttctccaacgagtcaaagcataatactctgttggttttcttatatacgatgttacgattttcttctttgaatggaataggtttttgaattagtttataattacaacataatagataaggaagtgtgcaaatagtacgcggaaaaaacataatagctcccctgttttcatccatggttttaagtaaatgatcactggcttctttagtcaatggatattcgaacattaaccgtttcatcatcattggacagaatccatatttcttaatgtaaagagtgatcaaatcattgtgtttattgtaccatcttgttgtaaatgtgtattcggttatcggatctgctcctttttctattaaagtatcgatgtcgatctcgtctaagaattcaactatatcgacatatttcatttgtatacacataaccattactaacgtagaatgtataggaagagatgtaacgggaacagggtttgttgattcgcaaactattctaatacataattcttctgttaatacgtcttgcacgtaatctattatagatgccaagatatctatataattattttgtaagatgatgttaactatgtgatctatataagtagtgtaataattcatgtatttcgatatatgttccaactctgtctttgtgatgtctagtttcgtaatatctatagcatcctcaaaaaatatattcgcatatattcccaagtcttcagttctatcttctaaaaaatcttcaacgtatggaatataataatctattttacctcttctgatatcattaatgatatagtttttgacactatcttctgtcaattgattcttattcactatatctaagaaacggatagcgtccctaggacgaactactgccattaatatctctattatagcttctggacataattcatctattataccagaattaatgggaactattccgtatctatctaacatagttttaagaaagtcagaatctaagacctgatgttcatatattggttcatacatgaaatgatctctattgatgatagtgactatttcattctctgaaaattggtaactcattctatatatgctttccttgttgatgaaggatagaatatactcaatagaatttgtaccaacaaactgttctcttatgaatcgtatatcatcatctgaaataatcatgtaaggcatacatttaacaattagagacttgtctcctgttatcaatatactattcttgtgataatttatgtgtgaggcaaatttgtccacgttctttaattttgttatagtagatatcaaatccaatggagctacagttcttggcttaaacagatatagtttttctggaacgaattctacaacattattataaaggactttgggtagataagtgggatgaaatcctattttaattaatgcgatagccttgtcctcgtgcagatatccaaacgcttttgtgatagtatggcattcattgtctagaaacgctctacgaatatctgtgacagatatcatctttagagaatatactagtcgcgttaatagtactacaatttgtattttttaatctatctcaataaaaaaattaatatgtatgattcaatgtataactaaactactaactgttattgataactagaatcagaatctaatgatgacgtaaccaagaagtttatctactgccaatttagctgcattatttttagcatctcgtttagattttccatctgccttatcgaatactcttccgtcgatatctacacaggcataaaatgtaggagagttactaggccccactgattcaatacgaaaagaccaatctctcttagttatttggcagtactcattaataatggtgacagggttagcatctttccaatcaataatttttttagccggaataacatcatcaaaagacttatgatcctctctcattgatttttcgcgggatacatcatctattatggcgtcagccataacatcagcatccggcttatccgcctccgttgtcataaaccaacgaggaggaatatcgtcggagctgtacaccatagcactacgttgaagatcgtacagagctttattaacttctcgcttctccatattaagttgtctagttagttgtgcagcagtagctccttcgattccaatgtttttaatagccgcacacacaatctctgcgtcagaacgctcgtcaatatagatcttagacatttttagagagaactaacacaaccagcaataaaactaatttattttatcatttttttattcatcatcctctggtggttcgtcgtttctatcgaatgtggatctgattaacccgtcatctataggtgatgctggttctggagattctggaggagatggattattatctggaagaatctctgttatttccttgttttcatgtatcgattgcgttgtaacattaagattgcgaaatgctctaaatttgggaggcttaaagtgttgtttgcaatctctacacgcatgtctaactagtggaggttcgtcagcggctctagtttgaatcatcatcggcgtagtattcctacttttacagttaggacacggtgtattgtatttctcgtcgagaacgttaaaataatcgttgtaactcacatcctttattttatctatattgtattctactcctttcttaatgcattttataccgaataagagatagcgaaggaattctttttcggtgccgctagtacccttaatcatatcacatagtgttttatattccaaatttgtggcaatagacggtttatttctatacgatagtttgtttctggaatcctttgagtattctataccaatattattctttgattcgaatttagtttcttcgatattagattttgtattacctatattcttgatgtagtactttgatgatttttccatggcccattctattaagtcttccaagttggcatcatccacatattgtgatagtaattctcggatatcagtagcggctaccgccattgatgtttgttcattggatgagtaactactaatgtatacattttccatttataacacttatgtattaactttgttcatttatattttttcattattatgttgatattaacaaaagtgaatatatatgttaataattgtattgtggttatacggctacaatttcataatgagtggaagtcagtgtccgatgatcaatgacgatagctttactctgaaaagaaagtatcaaatcgatagtgcggagtcaacaataaaaatggataagaagaggataaagtttcagaatagagccaaaatggtaaaagaaataaatcagacaataagagcagcacaaactcattacgagacattgaaactaggatacataaaatttaagagaatgattaggactactactctagaagatatagcaccatctattccaaataatcagaaaacttataaactattctcggacatttcagccatcggcaaagcatcacagaatccgagtaagatggtatatgctctgctgctttacatgtttcccaatttgtttggagatgatcatagattcattcgttatagaatgcatccaatgagtaaaatcaaacacaagatcttctctcctttcaaacttaatcttattagaatattagtggaagaaagattctataataatgaatgcagatctaataaatggagaataattggaacacaagttgataaaatgttgatagctgaatctgataaatatacaatagatgcaaggtataacctaaaacccatgtatagaatcaagggaaaatctgaagaagataccctctttatcaaacagatggtagaacaatgtgtgacatcccaggaattggtggaaaaagtgttgaagatactgtttagagatttgttcaagagtggagaatacaaagcgtacagatacgatgatgatgtagaaaatggatttattggattggatacactaaaattaaacattgttcatgatatagttgaaccatgtatgcctgttcgtaggccagtggctaagatactgtgtaaagaaatggtaaataaatactttgagaatccgctacatattattggtaaaaatcttcaagagtgcattgactttgttagtgaataggcatttcatctttctccaatactaattcaaattgttaaattaataatggatagtataaatagttattagtgataaaatagtaaaaataattattagaataagagtgtagtatcatagataactctcttctataaaaatggattttattcgtagaaagtatcttatatacacagtagaaaataatatagattttttaaaggatgatacattaagtaaagtaaacaattttaccctcaatcatgtactagctctcaagtatctagttagcaattttcctcaacacgttattactaaggatgtattagctaataccaatttttttgttttcatacatatggtacgatgttgtaaagtgtacgaagcggttttacgacacgcatttgatgcacccacgttgtacgttaaagcattgactaagaattatttatcgtttagtaacgcaatacaatcgtacaaggaaaccgtgcataaactaacacaagatgaaaaatttttagaggttgccgaatacatggacgaattaggagaacttataggcgtaaattatgacttagttcttaatccattatttcacggaggggaacccatcaaagatatggaaatcatttttttaaaactgtttaagaaaacagacttcaaagttgttaaaaaattaagtgttataagattacttatttgggcttacctaagcaagaaagatacaggcatagagtttgcggataatgatagacaagatatatacactctatttcaacaaactggtagaatagtccatagcaatctaacagaaacgtttagagattatatctttcccggagataagactagctattgggtgtggttaaacgaaagtatagctaatgatgcggatattgttcttaatagacacgccattaccatgtatgataaaattcttagttatatatactctgagataaaacaaggacgcgttaataaaaacatgcttaagttagtttatatctttgagcctgaaaaagatatcagagaacttctgctagaaatcatatatgatattcctggagatatcctatctattattgatgcaaaaaacgacgattggaaaaaatattttattagtttttataaagctaattttattaacggtaatacatttattagtgatagaacgtttaacgaggacttattcagagttgttgttcaaatagatcccgaatatttcgataatgaacgaattatgtctttattctctacgagtgctgcggacattaaacgatttgatgagttagatattaataacagttatatatctaatataatttatgaggtgaacgatatcacattagatacaatggatgatatgaagaagtgtcaaatctttaacgaggatacgtcgtattatgttaaggaatacaatacatacctgtttttgcacgagtcggatcccatggtcatagagaacggaatactaaagaaactgtcatctataaaatccaagagtagacggctgaacttgtttagcaaaaacattttaaaatattatttagacggacaattggctcgtctaggtcttgtgttagatgattataaaggagacttgttagttaaaatgataaaccatcttaagtctgtggaggatgtatccgcattcgttcgattttctacagataaaaaccctagtattcttccatcgctaatcaaaactattttagctagttataatatttccatcatcgtcttatttcaaaggtttttgagagataatctatatcatgtagaagaattcttggataaaagcatccatctaaccaagacggataagaaatatatacttcaattgataagacacggtagatcatagaacagaccaaatatattattaataatttgtatatacatagatataattatcacacatttttgataaatgggaactgctgcaacaattcagactcccaccaaattaatgaataaagaaaatgcagaaatgattttggaaaaaattgttgatcatatagttatgtatattagtgacgaatcaagtgattcagaaaataatcctgaatatattgattttcgtaacagatacgaagactatagatctctcattataaaaagtgatcacgagtttgtaaagctatgtaaaaatcatgcagagaaaagttctccagaaacgcaacaaatgattatcaaacacatatacgaacaatatcttattccagtatctgaagtactattaaaacctataatgtccatgggtgacataattacatataacggatgtaaagacaatgaatggatgctagaacaactctctaccctaaactttaacaatctccgcacatggaactcatgtagcataggcaatgtaacgcgtctgttttatacattttttagttatctgatgaaagataaactaaatatataagtataatcccattctaatactttaacctgatgtattacctgcatcttattagaatattaacctaactaaaagacataacatagttgataaaaagcggtaggatataaatattatggctgccaccgttccgcgttttgacgacgtgtacaaaaatgcacaaagaagaattctagatcaagaaacattttttagtagaggtctaagtagaccgttaatgaaaaacacatatctatttgataattacgcgtatggatggataccagaaactgcaatttggagtagtagatacgcaaacttagatgcaagtgactattatcccatttcgttgggattacttaaaaagttcgagtttctcatgtctctatataaaggtcctattcccgtatatgaagaaaaagtaaatactgaattcattgctaatggatcgttctctggtagatacgtatcatatcttcgaaagttttctgcccttccaacaaacgagtttattagttttttgttactgacttccattccaatctataatatcttgttctggtttaaaaatactcagtttgatattactaaacacacattattcagatacgtctatacagataatgccaaacacctggcgttggctaggtatatgcatcaaacaggagactataagcctttgtttagtcgtctcaaagagaattatatatttaccggtcccgttccaataagtatcaaagatatagatcaccctaatcttagtagagcaagaagtccatccgattatgagacattagctaatattagtactatattgtactttaccaagtatgatccggtattaatgtttttattgttttacgtacctgggtattcaattactacaaaaattactccagccgtagaatatctaatggataaactgaatctaacaaagagcgacgtacaactgttgtaaattattttatgcttcgtaaaatgtaggttttgaaccaaacattctttcaaagaatgagatgcataaaactttattatccaatagattgactatttcggacgtcaatcgtttaaagtaaacttcgtaaaatattctttgatcactgccgagtttaaaacttctatcgataattgtttcatatgttttaatatttacaagttttttggtccatggtacattagccggacaaatatatgcaaaataatatcgttctccaagttctatagtttctggattatttttattatattcagtaaccaaatacatattagggttatctgcggatttataatttgagtgatgcattcgactcaacataaataattctagaggagacgatctactatcaaattcggatcgtaaatctgtttctaaagaacggagaatatctatacatacctgattagaattcatccgtccttcagacaacatctcagacagtctggtcttgtatgtcttaatcatattcttatgaaacttggaaacatctcttctagtttcactagtacctttattaattctctcaggtacagattttgaattcgacgatgctgagtatttcatcgttgtatatttcttcttcgattgcataatcagattcttatataccgcctcaaactctattttaaaattattaaacaatactctattattaatcagtcgttctaactctttcgctatttctatagacttatcgacatcttgactgtctatctctgtaaacacggagtcggtatctccatacacgctacgaaaacgaaatctgtaatctataggcaacgatgttttcacaatcggattaatatctctatcgtccatataaaatggattacttaatggattggcaaaccgtaacataccgttagataactctgctccatttagtaccgattctagatacaagatcattctacgtcctatggatgtgcaactcttagccgaagcgtatgagtatagagcactatttctaaatcccatcagaccatatactgagttggctactatcttgtacgtatattgcatggaatcatagatggccttttcagttgaactggtagcctgttttagcatctttttatatctggctctctctgccaaaaatgttcttaatagtctaggaatggttccttctatcgatctatcgaaaattgctatttcagagatgaggttcggtagtctaggttcacaatgaaccgtaatatatctaggaggtggatatttctgaagcaagagctgattatttatttcttcttccaatctattggtactaacaacgacaccgactaatgtttccggagatagatttccaaagatacacacattaggatacagactgttataatcaaagattaatacattattactaaacattttttgttttggagcaaataccttaccgccttcataaggaaacttttgttttgtttctgatctaactaagatagttttagtttccaacaatagctttaacagtggacccttgatgactgtactcgctctatattcgaataccatggattgaggaagcacatatgttgacgcacccgcgtctgtttttgtttctactccataatactcccacaaatactgacacaaacaagcatcatgaatacagtatctagccatatctaaagctatgtttagattataatccttatacatctgagctaaatcaacgtcatcctttccgaaagataatttatatgtatcattaggtaaagtaggacatgatagtacgactttaaatccattttcccaaatatctttacgaattactttacatataatatcctcatcaacagtcacataattacctgtggttaaaacctttgcaaatgcagcggctttgcctttcgcgtccgtagtatcgtcaccgatgaacgtcatttctctaactcctctatttaatactttacccatgcaactgaacgcgttcttggatatagaatccaatttgtacgaatccaatttttcagatttttgaatgaatgaatatagatcgaaaaatatagttccattattgttattaacgtgaaacgtagtattggccatgccgcctactcccttatgactagactgatttctctcataaatacagagatgtacagcttcctttttgtccggagatctaaagataatcttctctcctgttaataactctagacgattagtaatatatctcagatcaaagttatgtccgttaaaggtaacgacgtagtcgaacgttagttccaacaattgtttagctattcgtaacaaaactatttcagaacatagaactagttctcgttcgtaatccatttccattagtgactgtatcctcaaacatcctctatcgacggcttcttgtatttcctgttccgttaacatctcttcattaatgagcgtaaacaataatcgtttaccacttaaatcgatataacagtaacttgtatgcgagattgggttaataaatacagaaggaaacttcttatcgaagtgacactctatatctagaaataagtacgatcttgggatatcgaatctaggtatttttttagcgaaacagttacgtggatcgtcacaatgataacatccattgttaatctttgtcaaatattgctcgtccaacgagtaacatccgtctggagatatcccgttagaaatataaaaccaactaatattgagaaattcatccatggtggcattttgtatgctgcgtttctttggctcttctatcaaccacatatctgcgacggagcattttctatctttaatatctagattataacttattgtctcgtcaatgtctatagttctcatctttcccaacggcctcgcattaaatggaggaggagacaatgactgatatatttcgtccgtaactacgtaataaaagtaatgaggaaatcgtataaatacggtctcgccatttcgacatctggatttcagatataaaaatctgttttcaccgtgactttcaaaccaattaatgcaccgaacatccatttatagaatttagaaatatattttcatttaaatgaatcccaaacattggggaagagccgtatggaccattatttttatagtactttcgcaagcgggtttagacggcaacatagaagcgtgtaaacgaaaactatatactatagtcagcactcttccatgtcctgcatgtagacggcacgcgactatcgctatagaggacaataatgtcatgtctagcgatgatctgaattatatttattattttttcatcagattatttaacaatttggcatctgatcccaaatacgcgatcgatgtgacaaaggttaaccctttataaacttaacccattataaaacttatgattagtcacgactgaaataaccgcgtgattattttttggtataattctacacggcatggtttctgtaactatgaattcaacccccgttacattagtgaaatctttaacaaacagcaagggttcgtcaaagacataaaactcattgtttacaatcgaaatagaccccctatcacacttaaaataaaaaatatccttatcctttaccaccaaataaaattctgattggtcaatgtgaatgtattcacttaacagttccacaaatttatttattaactccgaggcacatacatcgtcggtattttttatggcaaactttactcttccagcatccgtttctaaaaaaatattaacgagttccatttatatcatccaatattattgaaatgacgttgatggacagatgatacaaataagaaggtacggtacctttgtccaccatctcctccaattcatgctctattttgtcattaactttaatgtatgaaaacagtacgccacatgcttccatgacagtgtgtaacactttggatacaaaatgtttgacattagtataattgtccaagactgtcaatctataatagatagtagctataatatattctatgatggtattgaagaagatgacaatcttggcatattgatcatttaacacagacatggtatcaacagatagcttgaatgaaagagaatcagtaattggaataagcgtcttctcgatagagtgtccgtataccaacatgtctgatattttgatgtattccattaaattatttagttttttctttttattctcgttaaacagcatttctgtcaacggaccccaacatcgttgaccgattaagttttgattgatttttccgtgtaaggcgtatctagtcagatcgtatagcctatccaataatccatcatctgtgcgtagatcacatcgtacactttttaattctctatagaagagcgacagacagcaatttctttattctctacagatgtaagatacttgaagacattcctatgatgatgcagaattttggataacacggtattgatggtatctgttaccataattcctttgatggctgatagtgtcagagcacaagatttccaatctttgttttgatatctatatcagacagcatggtgcgtctgacaacacaaggattaagacggaaagatgaaatgattctctcaacatcttcaatggataccttgctattttttctggcattatctatatgtgcgagaatatcctctagagaatcagtatcctttttgatgatagtggatctcaatgacatgggacgtctaaaccttcttattctatcaccagattgcatggtgatttgtcttctttcttttatcataatgtaatctctaaattcatcggcaaattgtctatatctaaaatcataatatgagatgtttacctctacaaatatctgttcgtccaatgttagagtatctacatcagttttgtattccaaattaaacatggcaacggatttaattttatattcctctattaagtcctcgtcgataataacagaatgtagataatcatttaatccatcgtacatggttggaagatgcttgttgacaaaatctttaattgtcttgatgaaggtgggactatatctaacatcttgattaataaaatttataacattgtccataggatactttgtaactagttttatacacatctcttcatcggtaagtttagacagaatatcgtgaacaggtggtatattatattcatcagatatacgaagaacaatgtccaaatctatattgtttaatatattatatagatgtagcgtagctcctacaggaatatctttaactaagtcaatgatttcatcaaccgttagatctattttaaagttaatcatataggcattgatttttaaaaggtatgtagccttgactacattctcattaattaaccattccaagtcactgtgtgtaagaagattatattctatcataagcttgactacatttggtcccgataccattaaagaattcttatgatataaggaaacagattttaggtactcatctactctacaagaattttggagagccttaacgatatcagtgacgtttattatttcaggaggaaagaatctaacattgagaatatcggaattaatagcttccagatacagtgattttggcaatagtccgtgtaatccataatccagtaacacgagctggtgcttgctagacaccttttcaatgtttaatttttttgaaataagctttgataaagccttcctcgcaaattccggatacatgaacatgtcggcgacatgattaagtattgttttttcattattttctcaacaagttctcaataccccaatagatgatagaatatcacccaatgcgtccatgttgtctatttccaacaggtcgctatatccaccaatagaagtttttccaaaaaagattctaggaacagttctaccaccagtaatttgttcaaaatagtcacgcaattcattttcgggtttaaattctttaatatcgacaatttcatacgctcctcttttgaaactaaacttatttagaatatccagtgcatttctacaaaaaggacatgtatacttgacaaaaattgtcactttgttattggccaacctttgttgtacaaattcctcggccattttaatatttaagtgatataaaactatctcgacttatttaactctttagtcgagatatatggacgcagatagctatatgatagccaactacagaaggcaaacgctataaaaaacataattacgacgagcatatttataaatatttttattcagcattacttgatatagtaatattaggcacagtcaaacattcaaccactctcgatacattaactctctcattttctttaacaaattctacaatatcttcgtaaaaagattcttgaaactttttagaatatctatcgactctagatgaaatagcgttcgtcaacatactatgttttgtatacataaaggcgcccattttaacagtttctagtgacaaaatgctagcgatcctaggatcctttagaatcacatagattgacgattcgtctctcttagtaactctagtaaaataatcatacaatctagtacgcgaaataatattatccttgacttgaggagatctaaacaatctagttttgagaacatcgataagttcatcgggaatgacatacatactatctttaatagaactcttttcatccagttgaatggattcgtccttaaccaactgattaatgagatcttctattttatcattttccagatgatatgtatgtccattaaagttaaattgtgtagcgcttctttttagtctagcagccaatactttaacatcactaatatcgatatacaaaggagatgatttatctatggtattaagaattcgtttttcgacatctgtcaaaaccaattcctttttgcctgtatcatccagttttccatcctttgtaaagaaattattttctactagactattaataagactgataaggattcctccataattgcacaatccaaactttttaacaaaactagactttacaagatctacaggaatgcgtaattcaggtttcttagcttgtgattttttcttttgtggacattttcttgtgaccaactcatctaccatttcattgattttagcagtgaaataagctttcaatgcacgggcactgatactattgaaaacgagttgatcttcaaattccgccatttaagttcaccaaacaacttttaaatacaaatatatcaatagtagtagaataagaactataaaaaaaataataattaaccaataccaaccccaacaaccggtattattagttgatgtgactgttttctcatcacttagaacagatttaacaatttctataaagtctgtcaaatcatcttccggagaccccataaatacaccaaatatagcggcgtacaacttatccatttatacattgaatattggcttttctttatcgctatcttcatcatattcatcatcaatatcaacaagtcccagattacgagccagatcttcttctacattttcagtcattgatacacgttcactatctccagagagtccgataacgttagccaccacttctctatcaatgattagtttcttgagtgcgaatgtaatttttgtttccgttccggatctatagaagacgataggtgtgataattgccttggccaattgtctttctcttttactgagtgattctagttcaccttctatagatctgagaatggatgattctccagtcgaaacatattctaccatggatccgtttaatttgttgatgaagatggattcatccttaaatgttttctctgtaatagtttccaccgaaagactatgcaaagaatttggaatgcgttccttgtgcttaatgtttccatagacggcttctagaagttgatacaacataggactagccgcggtaacttttatttttagaaagtatccatcgcttctatcttgtttagatttatttttataaagtttagtctctccttccaacataataaaagtggaagtcatttgactagataaactatcagtaagttttatagagatagacgaacaattagcgtattgagaagcatttagtgtaacgtattcgatacattttgcattagatttactaatcgattttgcatactctataacacccgcacaagtctgtagagaatcgctagatgcagtaggtcttggtgaagtttcaactctcttcttgattaccttactcatgattaaacctaaataattgtactttgtaatataatgatatatattttcactttatctcatttgagaataaaaatgtttttgtttaaccactgcatgatgtacagatttcggaatcgcaaaccaccagtggttttattttatccttgtccaatgtgaattgaatgggagcggatgcgggtttcgtacgtagatagtacattcccgtttttagaccgagactccatccgtaaaaatgcatactcgttagtttggaataactcggatctgctatatggatattcatagattgactttgatcgatgaaggctcccctgtctgcagccatttttatgatcgtcttttgtggaatttcccaaatagttttataaactcgcttaatatcttctggaaggtttgtattctgaatggatccaccatctgccataatcctattcttgatctcatcattccataattttctctcggttaaaactctaaggagatgcggattaactacttgaaattctccagacaatactctccgagtgtaaatattactggtatacggttccaccgactcattatttcccaaaatttgagcagttgatgcagtcggcataggtgccaccaataaactatttctaagaccgtatgttctgattttatcttttagaggttcccaattccaaagatccgacggtacaacattccaaagatcatattgtagaataccgttactggcgtacgatcctacatatgtatcgtatggtccttccttctcagctagttcacaactcgcctctaatgcaccgtaataaatggtttcgaagatcttcttatttagatcttgtgcttccaggctatcaaatggataatttaagagaataaacgcgtccgctaatccttgaacaccaataccgataggtctatgtctcttattagagatttcagcttctggaataggataataattaatatctataattttattgagatttctgacaattactttgaccacatccttcagtttgagaaaatcaaatcgcccatctattacaaacatgttcaaggcaacagatgccagattacaaacggctacctcattagcatccgcatattgtattatctcagtgcaaagattactacacttgatagttcctaaattttgttgattactctttttgttacacgcatccttataaagaatgaatggagtaccagtttcaatctgagattctataatcgctttccagacgactcgagcctttattatagatttgtatctcctttctctttcgtatagtgtatacaatcgttcgaactcgtctccccaaacattgtccaatccaggacattcatccggacacatcaacgaccactctccgtcatccttcactcgtttcataaagagatcaggaatccaaagagctataaatagatctctggttctatgttcctcgtttcctgtattctttttaagatcgaggaacgccataatatcagaatgccacggttccaagtatatggccataactccaggccgtttgtttcctccctgatctatgtatctagcggtgttattataaactctcaacattggaataataccgtttgatataccattggtaccggagatatagcttccactggcacgaatattactaattgatagacctattccccctgccattttagagattaatgcgcatcgttttaacgtgtcatagataccctctatgctatcatcgatcatgttaagtagaaaacagctagacatttggtgacgactagttcccgcattaaataaggtaggagaagcgtgcgtaaaccatttttcagaaagtagattgtacgtctcaatagctgagtctatatcccattgatgaattcctactgcgacacgcattaacatgtgctgaggtctttcaacgatcttgttgtttattttcaacaagtaggatttttccaaagttttaaaaccaaaatagttgtatgaaaagtctcgttcgtaaataataaccgagttgagtttatccttatatttgttaactatatccatggtgatacttgaaataatcggagaatgtttcccatttttaggattaacatagttgaataaatcctccatcacttcactaaatagtttttttgtttccttgtgtagatttgatacggctattctggcggctagaatggcataatccggatgttgtgtagtacaagtggctgctatttcggctgccagagtgtccaattctaccgttgttactccattatatattccttgaataaccttcatagctattttaataggatctatatgatccgtgtttaagccataacataattttctaatacgagacgtgattttatcaaacatgacattttccttgtatccatttcgtttaatgacaaacatttttgttggtgtaataaaaaaaattatttaacttttcattaatagggatttgacgtatgtagcgtacaaaattatcgttcctggtatatagataaagagtcctatatatttgaaaatcgttacggctcgattaaactttaatgattgcatagtgaatatatcattaggatttaactccttgactatcatggcggcgccagaaattaccatcaaaagcattaatacagttatgccgatcgcagttagaacggttatagcatccaccatttatatctaaaaattagatcaaagaatatgtgacaaagtcctagttgtatactgagaattgacgaaacaatgtttcttacatattttttttttattagtaaccgacttaatagtaggaactggaaaactagacttgattattctataagtatagatacccttccaaataatattctctttgataaaagttccagaaaatgtagaattttttaaaaagttatcttttgctattaccaagattgtgtttagacgcttattattaatatgagtgatgaaatccacaccgcctctagatatcgcttttatttccacattagatggtaaatccaatagtgaaactatctttttaggaatgtatggactcgcgtttagaggagtgaacgtcttaggcgtcggaaaggatgattcatcaaacgaataaacaatttcacaaatggatgttaatgtattagtaggaaattttttgacgctagtggaattgaagattctaatggatgatgttctacctatttcatccgataacatgttaatttccgacaccaacggttttaatatttcgatgatatacggtagtctctctttcggacttatatagcttattccacaatacgagtcattatatactccaaaaaacaaaataactagtataaaatctgtatcgaatgggaaaaacgaaattatcgacataggtatagaatctggaacattgaacgtattaatacttaattctttttctgtggtaagtaccgataggttattgacattgtatggttttaaatattctataacttgagacttgatagatattagtgatgaattgaaaattatttttatcaccacgtgtgtttcaggatcatcgtcgacgcccgtcaaccaaccgaatggagtaaaataaatatcattaatatatgctctagatattagtatttttatcaatcctttgattatcatcttctcgtaggcgaatgattccatgatcaagagtgatttaagaacatcctccggagtattaatgggcttagtaaacagtccatcgttgcaataataaaagttatccaagttaaaggatattatgcattcgtttaaagatatcacctcatctgacggagacaattttttggtaggttttagagactttgaagctacttgtttaacaaagttattcatcgtcgtttactattctatttaattttgtagttaatttatcacatatcacattaattgactttttggtccatttttccatacgtttatattcttttaatcctgcgttatccgtttccgttatatccagggatagatcttgcaagttaaatagaatgctcttaaataatgtcattttcttatccgctaaaaatttaaagaatgtataaacctttttcagagatttgaaactcttaggtggtgtcctagtacacaatatcataaacaaactaataaacattccacattcagattccaacagctgattaacttctacattaatacagcctattttcgctccaaatgtacattcgaaaaatctgaataaaacatcgatgtcacaatttgtattatccaatacagaatgtttgtgattcgtgttaaaaccatcggagaaggaataaaaataaaaattattatagtggtggaattcagttggaatattgcctccggagtcataaaaggatactaaacattgttttttatcataaattacacatttccaatgagacaaataacaaaatccaaacattacaaatctagaggtagaacttttaattttgtctttaagtatatacgataagatatgtttattcataaacgcgtcaaatttttcatgaatcgctaaggagtttaagaatctcatgtcaaattgtcctatataatccacttcggatccataagcaaactgagagactaagttcttaatacttcgattgctcatccaggctcctctctcaggctctattttcatcttgacgacctttggattttcaccagtatgtattcctttacgtgataaatcatcgattttcaaatccatttgtgagaagtctatcgccttagatactttttcccgtagtcgaggtttaaagaaatacgctaacggtatactagtaggtaactcaaagacatcatatatagaatggtaacgcgtctttaactcgtcggttaactctttcttttgatcgagttcgtcgctactattgggtctgctcaggtgccccgactctactagttccaacatcataccgataggaatacaagacactttgccggcggttgtagatttatcatatttctccactacatatccgttacaatttgttaaaaatttagatacatctatattgctacataatccagctagtgaatatatatgacataataaattggtaaatcctagttctggtattttactaattactaaatctgtatatctttccatttatcatggaaaagaatttaccagatatcttcttttttccaaactgcgttaatgtattctcttacaaatattcacaagatgaattcagtaatatgagtaaaacggaacgtgatagtttctcattggcggtgtttccagttataaaacatagatggcataacgcacacgttgtaaaacataaaggaatatacaaagttagtacagaagcacgtggaaaaaaagtatctcctccatcactaggaaaacccgcacacataaacctaaccgcgaagcaatatatatacagtgaacacacaataagctttgaatgttatagttttctaaaatgtataacaaatacagaaatcaattcgttcgatgagtatatattaagaggactattagaagctggtaatagtttacagatattttccaattccgtaggtaaacgaacagatactataggtgtactagggaataagtatccatttagcaaaattccattggcctcattaactcctaaagcacaacgagagatattttcagcgtggatttctcatagacctgtagttttaactggaggaactggagtgggtaagacgtcacaggtacccaagttattgctttggtttaattatttatttggtggattctctactctagataaaatcactgactttcacgaaagaccagtcattctatctcttcctaggatagctttagttagattgcatagcaataccattttaaaatcattgggatttaaggtactagatggatctcctatttctttacggtacggatctataccggaagaattaataaacaaacaaccaaaaaaatatggaattgtattttctacccataagttatctctaacaaaactatttagttatggcactcttattatagacgaagttcatgagcatgatcaaataggagatattattatagcagtagcgagaaagcatcatacgaaaatagattctatgtttttaatgactgccacgttagaggatgacagggaacggctaaaagtatttttacctaatcccgcatttatacatattcctggagatacactgtttaaaattagcgaggtatttattcataataagataaatccatcttccagaatggcatacatagaagaagaaaagagaaatttagttactgctatacagatgtatactcctcctgatggatcatccggtatagtctttgtggcatccgttgcacagtgtcacgaatataaatcatatttagaaaaaagattaccgtatgatatgtatattattcatggtaaggtcttagatatagacgaaatattagaaaaagtgtattcatcacctaatgtatcgataattatttctactccttatttggaatccagcgttactatacgcaatgttacacacatttatgatatgggtagagtttttgtccccgctccttttggaggatcgcaagaatttatttctaaatctatgagagatcaacgaaaaggaagagtaggaagagttaatcctgggacatacgtatatttctatgatctgtcttatatgaagtctatacagcgaatagattcagaatttctacataattatatattgtacgctaataagtttaatctaacactccccgaagatttgtttataatccctacaaatttggatattctatggcgtacaaaggaatatatagactcgttcgatattagtacagaaacatggaataaattattatccaattattatatgaagatgatagagtatgctaaactttatgtactaagtcctattctcgctgaggagttggataattttgagaggacgggagaattaactagtattgtacaagaagccattttatctctaaatttacgaattaagattttaaattttaaacataaagatgatgatacgtatatacacttttgtaaaatattattcggtgtctataacggaacaaacgctactatatattatcatagacctctaacgggatatatgaatatgatttcagatactatatttgttcctgtagataataactaaaaatcaaactctaatgaccacatctttttttagagatgaaaaattttccacatctccttttgtagacacgactaaacattttgcagaaaaaagtttattagtgtttagataatcgtatacttcatcagtgtagatagtaaatgtgaacagataaaaggtattcttgctcaatagattggtaaattccatagaatatattaatcctttcttcttgagatcccacatcatttcaaccagagacgttttatccaatgatttacctcgtactataccacatacaaaactagattttgcagtgacgtcgtatctggtattcctaccaaacaaaattttacttttagttcttttagaaaattctaaggtagaatctctatttgccaatatgtcatctatggaattaccactagcaaaaaatgatagaaatatatattgatacatcgcagctggttttgatctactatactttaaaaacgaatcagattccataattgcctgtatatcatcagctgaaaaactatgttttacacgtattccttcggcatttctttttaatgatatatcttgtttagacaatgataaagttatcatgtccatgagagacgcgtctccgtatcgtataaatatttcattagatgttagacgcttcattaggggtatacttctataaggtttcttaatcagtccatcattggttgcgtcaagaactactatcggatgttgttgggtatctctagtgttacacatggccttactaaagtttgggtaaataactatgatatctctattaattatagatgcatatatttcatttgtcaaggatattagtatcgacttgctatcgtcattaatacgtgtaatgtaatcatataaatcatgcgatagccaaggaaaatttaaatagatgttcatcatataatcgtcgctataattcatattaatacgttgacattgactaatttgtaatatagcctcgccacgaagaaagctctcgtattcagtttcatcgataaaggataccgttaaatataactggttgccgatagtctcatagtctattaagtggtaagtttcgtacaaatacagaatccctaaaatattatctaatgttggattaatctttaccataactgtataaaatggagacggagtcataactattttaccgtttgtacttactggaatagacgaaggaataatctccggacatgctggtaaagacccaaatgtctgtttgaagaaatccaatgttccaggtcctaatctcttaacaaaaattacgatattcgatcccgatatcctttgcattctatttaccagcatatcacgaactatattaagattatctatcatgtctattctcccaccgttatataaatcgcctccgctaagaaacgttagtatatccatacaatggaatacttcatttctaaaatagtattcgttttctaattctttaatgtgaaatcgtatactagaaagggaaaaattatctttgagttttccgttagaaaagaaccacgaaactaatgttctgattgcgtccgattccgttgctgaattaatggatttacaccaaaaactcatataacttctagatgtagaagcattcgctaaaaaattagtagaatcaaaggatataagtagatgttccaacaagtgagcaattcccaagatttcatctatatcattctcgaatccgaaattagaaattcccaagtagatatcctttttcatccgatcgttgatgaaaatacgaactttattcggtaagacaatcatttactaaggagtaaaataggaagtaatgttcgtatgtcgttatcatcgtataaattaaaggtgtgttttttaccattaagtgacattataattttaccaatattggaattataatataggtgtatttgcgcactcgcgacggttgatgcatcggtaaatatagctgtatctaatgttctagtcggtatttcatcatttcgctgtctaataatagcgttttctctatctgtttccattacagctgcctgaagtttattggtcggataatatgtaaaataataagaaatacatacgaataacaaaaataaaataagatataataaagatgccatttagagatctaattttgtttaacttgtccaaattcctacttacagaagatgaggaatcgttggagatagtgtcttccttatgtagaggatttgaaatatcttatgatgacttgataacttactttccagataggaaataccataaatatatttctaaagtatttgaacatgtagatttatcggaggaattaagtatggaattccatgatacaactctgagagatttagtctatcttagattgtacaagtattccaagtgtatacggccgtgttataaattaggagataatctaaaaggcatagttgttataaaggacaggaatatttatattagagaagcaaatgatgacttgatagaatatctcctcaaggaatacactcctcagatttatacatattctaatgagcgcgtccccataactggttcaaaattaattctttgtggattttctcaagttacatttatggcgtatacaacgtcgcatataacaacaaataaaaaggtagatgttctcgtttccaaaaaatgtatagatgaactagtcgatccaataaattatcaaatacttcaaaatttatttgataaaggaagcggaacaataaacaaaatactcaggaagatattttattcggtaaccggtggccaaactccataatttgctttttctatttcggattttagaatttccaaattcaccagcgatttatcggttttggtgaaatccaaggatttattaatgtccacaaatgccatttgttttgtctgtggattgtatttgaaaatggaaacgatgtagttagatagatgcgctgcaaagtttcctattagggttccgcgctttacgtcacccagcatacttgaatcaccatcctttaaaaaaaatgataagatatcaacatggagtatatcatactcggattttaattcttctactgcatcactgacattttcacaaatactacaatacggtttaccgaaaataatcagtacgttcttcatttatgggtatcaaaaacttaaaatcgttactgctggaaaataaatcactgacgatattagatgataatttatacaaagtatacaatggaatatttgtggatacaatgagtatttatatagccgtcgccaattgtgtcagaaacttagaagagttaactacggtattcataaaatacgtaaacggatgggtaaaaaagggagggcatgtaaccctttttatcgatagaggaagtataaaaattaaacaagacgttagagacaagagacgtaaatattctaaattaaccaaggacagaaaaatgctagaattagaaaagtgtacatccgaaatacaaaatgttaccggatttatggaagaagaaataaaggcagaaatgcaattaaaaatcgataaactcacatttcaaatatatttatctgattctgataacataaaaatatcattgaatgagatactaacacatttcaacaataatgagaatgttacattattttattgtgatgaacgagacgcagaattcgttatgtgtctcgaggctaaaacacatttctctaccacaggagaatggccgttgataataagtaccgatcaggatactatgctatttgcatctactgataatcatcctaagatgataaaaaacttaactcaactgtttaaatttgttccctcggcagaggataactatttagcaaaattaacggcgttagtgaatggatgtgatttctttcctggactctatggggcatctataacacccaccaacttaaacaaaatacaattgtttagtgattttacaatcgataatatagtcactagtttggcaattaaaaattattatagaaagactaactctaccgtagacgtgcgtaatattgttacgtttataaacgattacgctaatttagacgatgtctactcgtatgttcctccttgtcaatgcactgttcaagaatttatattttccgcattagatgaaaaatggaacaattttaaatcatcttatttagagaccgttccgttaccctgccaattaatgtatgcattagaaccacgcaaggagattgatgtttcagaagttaaaactttatcatcttatatagatttcgaaaatactaaatcagatatcgatgttataaaatctatatcttcgatcttcggatattctaacgaaaactgtaacactatagtgttcggcatctataaggataatttactactgagtataaatagttcattttactttaacgatagtctgttaataaccaatactaaaagtgataatataataaatataggttactagattaaaaatggtgttccaactcgtgtgctctacgtgcggcaaagatatttctcacgaacgatataaattgattatacgaaaaaaatcattaaaggatgtactcgtcagtgtaaagaacgaatgttgtaggttaaaattatctacacaaatagaacctcaacgtaacttaacagtgcaacctctattggatataaactaatatggatccggttaattttatcaagacatatgcgcctagaggttctattatttttattaattataccatgtcattaacaagtcatttgaatccatcgatagaaaaacatgtgggtatttattatggtacgttattatcggaacacttggtagttgaatctacctatagaaaaggagttcgaatagtcccattggatagtttttttgaaggatatcttagtgcaaaagtatacatgttagagaatattcaagttatgaaaatagcagctgatacgtcattaactttattgggtattccgtatggatttggtcataatagaatgtattgttttaaattggtagctgaatgttataaaaatgccggtattgatacatcgtctaaacgaatattaggtaaagatatttttctgagccaaaacttcacagatgataatagatggataaagatatatgattctaataatttaacattttggcaaattgattaccttaaagggtgagttaatatgcataactactcctccgttgttttttccctcgttctttttcttaacgttgtttgccatcactctcataatgtaaagatattctaaaatggtaaacttttgcatatcggacgcagaaattggtataaatgttgtaattgtattatttcccgtcaatggactagtcacagctccatcagttttatatcctttagagtatttctcactcgtgtctaacattctagagcattccatgatctgtttatcgttgatattggccggaaagatagattttttattttttattatattactattggcaattgtagatataacttctggtaaatatttttctaccttttcaatctcttctattttcaagccggctatatattctgctatattgttgctagtatcaataccttttctggctaagaagtcatatgtggtattcactatatcagttttaactggtagttccattagcctttccacttctgcagaataatcagaaattggttctttaccagaaaatccagctactataataggctcaccgatgatcattggcaaaatcctatattgtaccagattaatgagagcatatttcatttccaataattctgctagttcttgagacattgatttatttgatgaatctagttggttctctagatactctaccatttctgccgcatacaataacttgttagataaaatcagggttatcaaagtgtttagcgtggctagaatagtgggcttgcatgtattaaagaatgcggtagtatgagtaaaccgttttaacgaattatatagtctccagaaatctgtggcgttacatacatgagccgaatgacatcgaagattgtccaatatttttaatagctgctctttgtccattatttctatatttgactcgcaacaattgtagataccattaatcactgattcctttttcgatgccggacaatagcacaattgtttagctttggactctatgtattcagaattaatagatatatctctcaatacagattgcactatacattttgaaactatgtcaaaaattgtagaacgacgctgttctgcagccatttaactttaaataatttacaaaaatttaaaatgagcatccgtataaaaatcgataaactgcgccaaattgtggcatatttttcagagttcagtgaagaagtatctataaatgtagactcgacggatgagttaatgtatatttttgccgccttgggcggatctgtaaacatttgggccattatacctctcagtgcatcagtgttctaccgcggagccgaaaacattgtgtttaatcttcctgtgtccaaggtaaaatcgtgtttgtgtagttttcacaatgatgccatcatagatatagaacctgatctggaaaataatctagtaaaactttctagttatcatgtagtaagtgtcgattgtaacaaggaactgatgcctattaggacagatactactatttgtctaagtatagatcaaaagaaatcttacgtgtttaattttcacaagtatgaagaaaaatgttgtggtagaaccgtcattcatttagaatggttgttgggctttatcaagtgtattagtcagcatcagcatttggctattatgtttaaagatgacaatattattatgaagactcctggtaatactgatgcgttttccagggaatattctatgactgaatgttctcaagaactacaaaagttttctttcaaaatagctatctcgtctctcaacaaactacgaggattcaaaaagagagtcaatgtttttgaaactagaatcgtaatggataatgacgataacattctaggaatgttgttttcggatagagttcaatcctttaagatcaacatctttatgacgtttttagattaatactttcaatgagataaatatgggtggcagagtaagtgttgagctccctaaacgggatccgcctccgggagtacccactgatgagatgttattaaacgtggataaaatgcatgacgtgatagctcccgctaagcttttagaatatgtgcatataggaccactagcaaaagataaagaggataaagtaaagaaaagatatccagagtttagattagtcaacacaggacccggtggtctttcggcattgttaagacaatcgtataatggaaccgcacccaattgctgtcgcacttttaatcgtactcattattggaaaaaggatggaaagatatcagataagtatgaagagggtgcagtattagaatcgtgttggccagacgttcacgacactggaaaatgcgatgttgatttattcgactggtgtcagggggatacgttcgatagaaacatatgccatcagtggatcggttcagcctttaataggagtgatagaactgtagagggtcaacaatcgttaataaatctgtataataagatgcaaacattatgtagtaaagatgctagtgtaccaatatgtgaatcatttttgcatcatttacgcgcacacaatacagaagatagcaaagagatgatcgattatattctaagacaacagtctgcggactttaaacagaaatatatgagatgtagttatcccactagagataagttagaagagtcattaaaatatgcggaacctcgagaatgttgggatccagagtgttcgaatgccaatgttaatttcttactaacacgtaattataataatttaggactttgcaatattgtacgatgtaatactagcgtgaacaacttacagatggataaaacttcctcattaagattgtcatgtggattaagcaatagtgatagattttctactgttcccgtcaatagagcaaaagtagttcaacataatattaaacattcgttcgacctaaaattgcatttgatcagtttattatctctcttggtaatatggatactaattgtagctatttaaatgggtgccgcggcaagcatacagacgacggtgaatacactcagcgaacgtatctcgtctaaattagaacaagaagcgaacgctagtgctcaaacaaaatgtgatatagaaatcggaaatttttatatccgacaaaaccatggatgtaacctcactgttaaaaatatgtgctctgcggacgcggatgctcagttggatgctgtgttatcagccgctacagaaacatatagtggattaacaccggaacaaaaagcatacgtaccagctatgtttactgctgcgttaaacattcagacgagtgtaaacactgttgttagagattttgaaaattatgtgaaacagacttgtaattctagcgcggtcgtcgataacaaattaaagatacaaaacgtaatcatagatgaatgttacggagccccaggatctccaacaaatttggaatttattaatacaggatctagcaaaggaaattgtgccattaaagcgttgatgcaattgacgactaaggccactactcaaatagcacctagacaagttgctggtacaggagttcagttttatatgattgttatcggtgttataatattggcagcgttgtttatgtactatgccaagcgtatgttgttcacatccaccaatgataaaatcaaacttattttagccaataaggaaaacgtccattggactacttacatggacacattctttagaacttctccgatggttattgctaccacggatatgcaaaactgaaaatatattgataatattttaatagattaacatggaagttatcgctgatcgtctagacgatatagtgaaacaaaatatagcggatgaaaaatttgtagattttgttatacacggtctagagcatcaatgtcctgctatacttcgaccattaattaggttgtttattgatatactattatttgttatagtaatttatatttttacggtacgtctagtaagtagaaattatcaaatgttgttggcgttggtggcgctagtcatcacattaactattttttattactttatactataatagtactagactgacttctaacaaacatctcacctgccataaataaatgcttgatattaaagtcttctatttctaacactattccatctgtggaaaataatactctgacattatcgctaattgacacatcggtgagtgatatgcctataaagtaataatcttctttgggcacatataccagtgtaccaggttctaacaacctatttactggtgctcctgtagcatactttttctttaccttgagaatatccatcgtttgcttggtcaatagcgatatgtgattttttatcaaccactcaaaaaagtaattggagtgttcatatcctctacgggctattgtctcatggccgtgtatgaaatttaagtaacacgactgtggtagatttgttctatagagccggttgccgcaaatagatagaactaccaatatgtctgtacaaatgttaaacattaattgattaacagaaaaaacaatgttcgttctgggaatagaaaccagatcaaaacaaaattcgttagaatatatgccacgtttatacatggaatataaaataactacagtttgaaaaataacagtatcatttaaacatttaacttgcggggttaatttcacaactttactgtttttaaactgttcaaaatatagcatcgatccatgagaaatacgtttagccgcctttaatagaggaaatcccaccgcctttctggatctcaccaacgacgatagttctgaccagcaacttatttcttcatcatccacctgttttaacatataataggcaggagatagatatccgtcattgcaatattccttttcgtaggcacacaatctaatattgataaaatctccattctcttctctgcatttattatcttgtttcggtggctgattaggctgtagtcttggtttaggctttggtatatcgttgttgaatctattttggtcattaaatctttcatttcttcctggtatatttctatcacctcgtttggttggatttttgtctatattatcgtttgtaacatcggtacgggtattcatttatcacaaaaaaaacttctctaaatgagtctactgctagaaaacctcatcgaagaagataccatattttttgcaggaagtatatctgagtatgatgatttacaaatggttattgccggcgcaaaatccaaatttccaagatctatgctttctatttttaatatagtacctagaacgatgtcaaaatatgagttggagttgattcataacgagaatatcacaggggcaatgtttaccacaatgtataatataagaaacaatttgggtctaggagatgataaactaactattgaagccattgaaaactatttcttggatcctaacaatgaggttatgcctcttatcattaataatacggatatgactgccgtcattcctaaaaaaagtggtaggagaaagaataagaacatggttattttccgtcaaggatcatcacctatcttgtgtattttcgaaactcgtaaaaagattaatatttataaagaaaatatggaatccgcgtcgactgagtatacacctatcggagacaacaaggctttgatatctaaatatgcgggaattaatgtcctgaatgtgtattctccttccacatccatgagattgaatgccatttacggattcaccaataaaaataaactagagaaacttagtactaataaggaactagaatcgtatagttctagccctcttcaagaacccattaggttaaatgattttctgggactattggaatgtgttaaaaagaatattcctctaacagatattccgacaaaggattgattactataaatggagaatgttcctaatgtatactttaatcctgtgtttatagagcccacgtttaaacattctttattaagtgtttataaacacagattaatagttttatttgaagtattcattgtattcattctaatatatgtattttttagatctgaattaaatatgttcttcatgcctaaacgaaaaatacccgatcctattgatagattacgacgtgctaatctagcgtgtgaagacgataaattaatgatctatggattaccatggatgacaactcaaacatctgcgttatcaataaatagtaaaccgatagtgtataaagattgtgcaaagcttttgcgatcaataaatggatcacaaccagtatctcttaacgatgttcttcgcagatgatgattcattttttaagtatttggctagtcaagatgatgaatcttcattatctgatatattgcaaatcactcaatatctagactttctgttattattattgatccaatcaaaaaataaattagaagccgtgggtcattgttatgaatctctttcagaggaatacagacaattgacaaaattcacagactttcaagattttaaaaaactgtttaacaaggtccctattgttacagatggaagggtcaaacttaataaaggatatttgttcgactttgtgattagtttgatgcgattcaaaaaagaatcctctctagctaccaccgcaatagatcctattagatacatagatcctcgtcgcgatatcgcattttctaacgtgatggatatattaaagtcgaataaagtgaacaataattaattctttattgtcatcatgaacggcggacatattcagttgataatcggccccatgttttcaggtaaaagtacagaattaattagacgagttagacgttatcaaatagctcaatataaatgcgtgactataaaatattctaacgataatagatacggaacgggactatggacgcatgataagaataattttgaagcattggaagcaactaaactatgtgatgtcttggaatcaattacagatttctccgtgataggtatcgatgaaggacagttctttccagacattgttgaattctgtgagcgtatggcaaacgaaggaaaaatagttatagtagccgcactcgatgggacatttcaacgtaaaccgtttaataatattttgaatcttattccattatctgaaatggtggtaaaactaactgctgtgtgtatgaaatgctttaaggaggcttccttttctaaacgattgggtgaggaaaccgagatagagataataggaggtaatgatatgtatcaatcggtgtgtagaaagtgttacgtcggctcataatattatattttttatctaaaaaactaaaaataaacattgattaaattttaatataatacttaaaaatggatgttgtgtcgttagataaaccgtttatgtattttgaggaaattgataatgagttagattacgaaccagaaagtgcaaatgaggtcgcaaaaaaactgccgtatcaaggacagttaaaactattactaggagaattattttttcttagtaagttacagcgacacggtatattagatggtgccaccgtagtgtatataggatctgctcccggtacacatatacgttatttgagagatcatttctataatttaggagtgatcatcaaatggatgctaattgacggccgccatcatgatcctattttaaatggattgcgtgatgtgactctagtgactcggttcgttgatgaggaatatctacgatccatcaaaaaacaactgcatccttctaagattattttaatttctgatgtgagatccaaacgaggaggaaatgaacctagtacggcggatttactaagtaattacgctctacaaaatgtcatgattagtattttaaaccccgtggcgtctagtcttaaatggagatgcccgtttccagatcaatggatcaaggacttttatatcccacacggtaataaaatgttacaaccttttgctccttcatattcagctgaaatgagattattaagtatttataccggtgagaacatgagactgactcgagttaccaaatcagacgctgtaaattatgaaaaaaagatgtactaccttaataagatcgtccgtaacaaagtagttgttaactttgattatcctaatcaggaatatgactattttcacatgtactttatgctgaggaccgtgtactgcaataaaacatttcctactactaaagcaaaggtactatttctacaacaatctatatttcgtttcttaaatattccaacaacatcaactgaaaaagttagtcatgaaccaatacaacgtaaaatatctagcaaaaattctatgtctaaaaacagaaatagcaagagatccgtacgcagtaataaatagaaacgtactactgagatatactaccgatatagagtataatgatttagttactttaataaccgttagacataaaattgattctatgaaaactgtgtttcaggtatttaacgaatcatccataaattatactccggttgatgatgattatggagaaccaatcattataacatcgtatcttcaaaaaggtcataacaagtttcctgtaaattttctatacatagatgtggtaatatctgacttatttcctagctttgttagactagatactacagaaactaatatagttaatagtgtactacaaacaggcgatggtaaaaagactcttcgtcttcccaaaatgttagagacggaaatagttgtcaagattctctaccgtcctaatataccattaaaaattgttagatttttccgcaataacatggtaactggagtagagatagccgatagatctgttatttcagtcgctgattaatcaattagtagagatgagataagaacattataataatcaataatatattttatatcttatatcttgtttagaaaaatgctaatattaaaatagctaacgctagtaatccaatcggaagccatttgatatctataatagggtatctaatttcctgattcagatagcggacagctatattctcggtagctactcgtttggaatcacaaacattatttacatctaatttactatctgtaatggaaacgtttcccaatgaaatggtacaatccgatacattgcattttgttatatttttttttaaagaggctggtaacaacgcatcgcttcgtttacatggctcgtaccaacaataatagggtaatcttgtatctattcctatccgtactatgcttttatcaggataaatacatttacatcgtatatcgtctttgttagcatcacagaatgcataaatttgttcgtccgtcatgataaaaatttaaagtgtaaatataactattattttatagttgtaataaaaagggaaatttgattgtatactttcggttctttaaaagaaactgacttgataaaaatggctgtaatctctaaggttacgtatagtctatatgatcaaaaagagattaatgctacagatattatcattagtcatgttaaaaatgacgacgatatcggtaccgttaaagatggtagactaggtgctatggatggggcattatgtaaaacttgtgggaaaacggaattggaatgtttcggtcactggggtaaagtaagtatttataaaactcatatagttaagcctgaatttatttcagaaattattcgtttactgaattatatatgtattcactgcggattattgcgttcacgagaaccgtattccgacgatattaacctaaaagagttatcgggacacgctcttaggagattaaaggataaaatattatccaagaaaaagtcatgttggaacagtgaatgtatgcaaccgtatcaaaaaattactttttcaaagaaaaaggtttgtttcgtcaacaagttggatgatattaacgttcctaattctctcatctatcaaaagttaatttctattcatgaaaagttttggccattattagaaattcatcaatatccagctaacttattttatacagactactttcccatccctccgttgattattagaccggctattagtttttggatagatagtatacccaaagaaaccaatgaattaacttacttattaggtatgatcgttaagaattgtaacttgaatgctgatgaacaggttatccagaaggcggtaatagaatacgatgatattaaaattatttctaataacacttccagtatcaatttatcatatatcacatccggcaaaaataatatgattagaagttatatcgtcgcccggcgaaaagatcagaccgctagatctgtaattggtcccagtacatctatcaccgttaatgaggtaggaatgcccgcatatattagaaatacacttacagaaaagatatttgttaatgcctttacagtggataaagttaaacaactattagcgtcaaaccaagttaaattttactttaataaacgattaaaccaattaacaagaatacgccaaggaaagtttatcaaaaataaaatacatttattgcctggtgattgggtagaagtagctgttcaagaatatacaagtattatttttggaagacagccgtctctacatagatacaacgtcatcgcttcatctatcagagctaccgaaggagatactatcaaaatatctcccggaattgtcaactctcaaaatgctgatttcgacggagatgaagaatggatgatattggagcaaaatcctaaagccgtaattgaacaaagtattcttatgtatccgacgacgttactcaaacacgatattcatggagcccccgtttatggatctattcaagatgaaatcgtagcagcgtattcattgtttaggatacaagatctttgtttagatgaagtattgaacatcttggggaaatatggaagagagttcgatcctaaaggtaaatgtaaattcagcggtaaagatatctatacttacttgataggtgaaaagattaattatccgggtctcttaaaggatggtgaaattattgcaaacgacgtagatagtaattttgttgtggctatgaggcatctgtcattggctggactcttatccgatcataagtcgaacgtggaaggtatcaactttattatcaagtcatcttatgtttttaagagatatctatctatttacggttttggggtgacattcaaagatctgagaccaaattcgacgttcactaataaattggaggccatcaacgtagaaaaaatagaacttatcaaagaagcatacgccaaatatctcaacgatgtaagagacgggaaaatagttccattatctaaagctttagaggcggactatgtggaatccatgttatccaacttgacaaatcttaatatccgagagatagaagaacatatgagacaaacgctgatagatgatccagataataacctcctgaaaatggccaaagcgggttataaagtaaatcccacagaactaatgtatattctaggtacttatggacaacagaggattgatggtgaaccagcagagactcgagtattgggtagagtcttaccttactatcttccagactctaaggatccagaaggaagaggttacattcttaattctttaacaaaaggattaacgggttctcaatattacttttcgatgctggttgcaagatctcaatctactgatatcgtctgtgaaacatcacgtaccggaacactggctagaaaaatcattaaaaagatggaggatatggtggtcgacggatacggacaagtagttataggtaatacgctcatcaagtacgccgccaattataccaaaattctaggctcagtatgtaaacctgtagatcttatctatccagatgagtccatgacttggtatttggaaattagtgctctgtggaataaaataaaacagggattcgtttactctcagaaacagaaacttgcaaaaaagacattggcgccgtttaatttcctagtattcgtcaaacccaccactgaggataatgctattaaggttaaggatctgtacgatatgattcataacgtcattgatgatgtgagagagaaatacttctttacggtatctaatatagattttatggagtatatattcttgacgcatcttaatccttctagaattagaattacaaaagaaacggctatcactatctttgaaaagttctatgaaaaactcaattatactctaggtggtggaactcctattggaattatttctgcacaggtattgtctgagaagtttacacaacaagccctgtccagttttcacactactgaaaaaagtggtgccgtcaaacaaaaacttggtttcaacgagtttaataacttgactaatttgagtaagaataagaccgaaattatcactctggtatccgatgatatctctaaacttcaatctgttaagattaatttcgaatttgtatgtttgggagaattaaatccaaacatcactcttcgaaaagaaacagataggtatgtagtagatataatagtcaatagattatacatcaagagagcagaaattaccgaattagtcgtcgaatatatgattgaacgattcatctcctttagcgtcattgtaaaggaatggggtatggaaacattcattgaggatgaggataatattagatttactgtctacctaaatttcgttgaaccggaagaattgaatcttagtaagtttatgatggttcttccgggtgccgccaacaagggcaagattagtaaattcaagattcctatctctgattatacgggatatgacgacttcaatcaaacaaaaaagctcaataagatgactgtagaactcatgaatctaaaagaattgggttctttcgatttggaaaacgtcaacgtgtatcctggagtatggaatacatacgatatcttcggtatcgaggccgctcgtgaatacttgtgcgaagccatgttaaacacctatggagaagggttcgattatctgtatcagccttgtgatcttctcgctagtttactatgtgctagttacgaaccagaatcagtgaataaattcaagttcggcgcagctagtactcttaagagagctacgttcggagacaataaagcattgttaaacgcggctcttcataaaaagtcagaacctattaacgataatagtagctgccacttttttagcaaggtccctaatataggaactggatattacaaatactttatcgacttgggtcttctcatgagaatggaaaggaaactatctgataagatatcttctcaaaagatcaaggaaatggaagaaacagaagacttttaattcttatcaataacatatttttctatgatctgtcttttaaacgatggattttccacaaatgcgcctctcaagtccctcatagaatgatacacgtataaaaaatatagcataggcaatgactccttatttttagacattagatatgccaaaatcatagccccgcttctatttactcccgcagcacaatgaaccaacacgggctcgtttcgttgatcacatttagataaaaaggcggttacgtcgtcaaaatatttactaatatcggtagttgtatcatctaccaacggtatatgaataatattaatattagagttaggtaatgtatatttatccatcgtcaaatttaaaacatatttgaacttaacttcagatgatggtgcatccatagcatttttataatttcccaaatacacattattggttactcttgtcattatagtgggagatttggctttgtgcatatctccagttgaacgtagtagtaagtatttatacaaacttttcttatccatttataacgtacaaatggataaaactactttatcggtaaacgcgtgtaatttagaatacgttagagaaaaggctatagtaggcgtacaagcagccaaaacatcaacacttatattctttgttattatattggcaattagtgcgctattactctggtttcagacgtctgataatccagtctttaatgaattaacgagatatatgcgaattaaaaatacggttaacgattggaaatcattaacggatagcaaaacaaaattagaaagtgatagaggtagacttctagccgctggtaaggatgatatattcgaattcaaatgtgtggatttcggcgcctattttatagctatgcgattggataagaaaacatatctgccgcaagctattaggcgaggtactggagacgcgtggatggttaaaaaggcggcaaaggtcgatccatctgctcaacaattttgtcagtatttgataaaacacaagtctaataatgttattacttgtggtaatgagatgttaaatgaattaggttatagcggttattttatgtcaccgcattggtgttccgattttagtaatatggaatagtgttagataaatgcggtaacgaatgttcctgtaaggaaccataacagcttagatttaacgttaaagatgagcataaacataataaacaaaattacaatcaaacctataacattaatatcaaacaatccaaaaaatgaaatcagtggagtagtaaacgcgtacataactcctggataacgtttagcagctgccgttcctattctagaccaaaaattcggtttcatgttttcgaaacggtattctgcaacaagtcgaggatcgtgttctacatatttggcggcgttatccagtatctgcctattgatcttcatttcgttttcgattctggctatttcaaaataaaatcccgatgatagacctccagactttataatttcatctacgatgttcagcgccgtagtaactctaataatataggctgataagctaacatcataccctcctgtatatgtgaatatggcatgatttttgtccattacaagctcggttttaactttattgcctgtaataatttctctcatctgtaggatatctatttttttgtcatgcattgccttcaagacgggacgaagaaacgtaatatcctcaataacgttatcgttttctacaataactacatattctacctttttattttctaactcggtaaaaaaattagaatcccatagggctaaatgtctagcgatatttcttttcgtttcctctgtacacatagtgttacaaaaccctgaaaagaagtgagtatacttgtcatcatttctaatgtttcctccagtccactgtataaacgcataatccttgtaatgatctggatcatccttgactaccacaacatttcttttttctggcataacttcattgtcctttacatcatcgaacttctgatcattaatatgctcatgaacattaggaaatgtttctgatggaggtctatcaataactggcacaacaataacaggagttttcaccgccgccatttagttattgaaattaatcatatacaactctttaatacgagttatattttcgtctatccattgtttcacatttacatatttcgacaaaaagatataaaatgcgtattccaatgcttctctgtttaatgaattactaaaatatacaaacacgtcactgtctggcaataaatgatatcttagaatattgtaacaatttattttgtattgcacatgttcgtgatctatgagttcttcttcgaatggcataggatctccgaatctgaaaacgtataaataggagttagaataataatatttgagagtattggtaatatataaactctttagcggtataattagtttttttctctcgatttctatttttagatgtgatggaaaaatgactaattttgtagcattagtatcatgaactctaatcgagatcttaatatcttcgtcacacgttagttctttgaagtttttaagagatgcatcagttggttcgaccgatggagtaggtgcaacaattttttgttcgatgtatgtatgtactggagccattgtcttaactataatggtgcttgtatcgaaaaactttaatgcagataatggaagctcttcgccgcgactttctacatcgtaattgggttctaacgccgatctctgaatggatactagttttctaagttctaatgtgattctctgaaaatgtaaatccaattcctccggcattatagatgtgtatacatcggtaaataaaactatagtatccaacgatcccttctcgcaaattctagtcttaaccaaaaaatcgtatataaccacggagatggcgtatttaagagtggattcttctaccgttttgttcttggatttcatataagaaactataaagtccgcactactgttaagaatgattactaacgcaactatatagtttaaattaagcatcttggaaacataaaataactctgtagacgatacttgactttcgaataagtttgcagacaaacgaagaaagaacagacctctcttaatttcagaagaaaactttttttcgtattcctgacgtctagagtttatatcaataagaaagttaagaattagtcggttaatgttgtatttcattacccaagtttgagatttcataatattatcaaaagacatgataatattaaagataaagcgctgactatgaacgaaatagctatatggttcgctcaagaatatagtcttgttaaacgtggaaacgataactgtatttttaatcacgtcagcggcatctaaattaaatataggtatatttattccacacactctacaatatgccacaccatcttcataataaataaattcgttagcaaaattattaattttagtgaaatagttagcgtcaactttcatagcttccttcaatctaatttgatgctcacacggtgcgaattccactctaacatcccttttccatgcctcaggttcatcgatctctataatatctagttttttgcgtttcacaaacacaggctcgtctctcgcgatgagatctgtatagtaactatgtaaatgataactagatagaaagatgtagctatatagatgacgatcctttaagagaggtatgatgactttaccccaatcagatagactgttgttatggtcttcggaaaaagaatttttataaatttttccagtattttccaaatatacgtacttaacatctaaaaaatccttaatgataataggaatggataatccgtctattttataaagaaatacatatcgcacattatacttttttttggaaatgggaataccgatgtgtctacataaatatgcaaagtctaaatattttttagagaatcttagttggtccaaattcttttccaagtacggtaatagatttttcatattgaacggtatcttcttaatctctggttctagttccgcattaaatgatgaaactaagtcactatttttataactaacgattacatcacctctaacatcatcatttaccagaatactgatcttcttttgtcgtaaatacatgtctaatgtgttaaaaaaaagatcatacaagttatacgtcatttcatctgtggtattcttgtcattgaaggataaactcgtactaatctcttctttaacagcctgttcaaatttatatcctatatacgaaaaaatagcaaccagtgtttgatcatccgcgtcaatattctgttctatcgtagtgtataacaatcgtatatcttcttctgtgatagtcgatacgttataaaggttgataacgaaaatatttttatttcgtgagataaagtcatcgtaggattttggacttatattcgcgtctagtagatatgcttttatttttggaatgatctcaattagaatagtctctttagagtccatttaaagttacaaacaactaggaaattggtttatgatgtataatttttttagtttttatagattctttattctatacttaaaaaatgaaaataaatacaaaggttcttgagggttgtgttaaattgaaagcgagaaataatcataaattatttcattatcgcgatatccgttaagtttgtatcgtaatggcgtggtcaattacaaataaagcggatactagtagcttcacaaagatggctgaaatcagagctcatctaaaaaatagcgctgaaaataaagataaaaacgaggatattttcccggaagatgtaataattccatctactaagcccaaaaccaaacgagccactactcctcgtaaaccagcggctactaaaagatcaaccaaaaaggaggaagtggaagaagaagtagttatagaggaatatcatcaaacaactgaaaaaaattctccatctcctggagtcagcgacattgtagaaagcgtggctgctgtagagctcgatgatagcgacggggatgatgaacctatggtacaagttgaagctggtaaagtaaatcatagtgctagaagcgatctttctgacctaaaggtggctaccgacaatatcgttaaagatcttaagaaaattattactagaatctctgcagtatcgacggttctagaggatgttcaagcagctggtatctctagacaatttacttctatgactaaagctattacaacactatctgatctagtcaccgagggaaaatctaaagttgttcgtaaaaaagttaaaacttgtaagaagtaaatgcgtgcacttttttataaagatggtaaactctttaccgataataattttttaaatcctgtatcagacgataatccagcgtatgaggttttgcaacatgttaaaattcctactcatttaacagatgtagtagtatatgaacaaacgtgggaggaggcgttaactagattaatttttgtgggaagtgattcaaaaggacgtagacaatacttttacggaaaaatgcatgtacagaatcgcaacgctaaaagagatcgtatttttgttagagtatataacgttatgaaacgaattaattgttttataaacaaaaatataaagaaatcgtccacagattccaattatcagttggcggtttttatgttaatggaaactatgttttttattagatttggtaaaatgaaatatcttaaggagaatgaaacagtagggttattaacactaaaaaataaacacatagaaataagtcccgatgaaatagttatcaagtttgtaggaaaggacaaagtttcacatgaatttgttgttcataagtctaatagactatataaaccgctattgaaactgacggatgattctagtcccgaagaatttctgttcaacaaactaagtgaacgaaaggtatacgaatgtatcaaacagtttggtattagaatcaaggatctccgaacgtatggagtcaattatacgtttttatataatttttggacaaatgtaaagtccatatctcctcttccgtcaccaaaaaagttaatagcgttaactatcaaacaaactgctgaagtggtaggtcatactccatcaatttcaaaaagagcttatatggcaacgactattttagaaatggtaaaggataaaaattttttagatgtagtatctaaaactacgttcgatgaattcctatctatagtcgtagatcacgttaaatcatctacggatggatgatatagatctttacacaaataattacaagaccgataaatggaaatggataagcgtatgaaatctctcgcaatgacagctttcttcggagagctaaacacattagatattatggcattgataatgtctatatttaaacgccatccaaacaataccattttttcagtggataaggatggtcagtttatgattgatttcgaatacgataattataaggcttctcaatatttggatctgaccctcactccgatatctggagatgaatgcaagactcacgcatcgagtatagccgaacaattggcgtgtgtggatattattaaagaggatattagcgaatatatcaaaactactccccgtcttaaacgatttataaaaaaataccgcaatagatcagatactcgtatcagtcgagatacagaaaagcttaaaatagctctagctaaaggcatagattacgaatatataaaagacgcttgttaataagtaaatgaaaaaaaactagtcgtttataataaaacacaatatggatgccaacatagtatcatcttctactattgcaacgtatatagacgctttagcgaagaatgcttcagaattagaacagaggtctaccgcatacgaaataaataatgaattggaactagtatttattaagccgccattaattactttgacaaatgtagtgaatatctctacgattcaggaatcgtttattcgatttaccgttactaataaggaaggtgttaaaattagaactaagattccattatctaaggtacatggtctagatgtaaaaaatgtacagttagtagatgctatagataacatagtttgggaaaagaaatcattagtgacggaaaatcgtcttcacaaagaatgcttgttgagactatcgacagaggaacgtcatatatttttggattacaagaaatatggatcctctatccgactagaattagtcaatcttattcaagcaaaaacaaaaaactttacgatagactttaagctaaaatattttctaggatccggtgcccagtctaaaagttctttattacacgctattaatcatccaaagtcaaggcctaatacatctctggaaatagaattcacacctagagacaatgaaaaagttccatatgatgaactaataaaggaattgacgactctatcacgtcatatatttatggcttctccagagaatgtaattctttctccgcctattaacgcgcctataaaaacctttatgttgcctaaacaagatatagtaggtttggatctggaaaatctatatgccgtaactaagactgacggaattcctataactatcagagttacatcaaaagggttgtattgttattttacacatcttggttatattattagatatcctgttaagagaataatagattccgaagtagtagtctttggtgaggcagttaaggataagaactggaccgtatatctcattaagctaatagagcctgtgaatgcaatcaatgatagactagaagaaagtaagtatgttgaatctaaactagtggatatttgtgatcggatagtattcaagtcaaagaaatacgaaggtccgtttactacaactagtgaagtcgtcgatatgttatctacatatttaccaaagcaaccagaaggtgttattctgttctattcaaagggacctaaatctaacattgattttaaaattaaaaaggaaaatactatagaccaaactgcaaatgtagtatttaggtacatgtccagtgaaccaattatctttggagaatcgtctatctttgtagagtataagaaatttagcaacgataaaggctttcctaaagaatatggttctggtaagattgtgttatataacggcgttaattatctaaataatatctattgtttggaatatattaatacacataatgaagtgggtattaagtccgtggttgtacctattaagtttatagcagaattcttagttaatggagaaatacttaaacctagaattgataaaaccatgaaatatattaactcagaagattattatggaaatcaacataatatcatagtcgaacatttaagagatcaaagcatcaaaataggagatatctttaacgaggataaactatcggatgtgggacatcaatacgccaataatgataaatttagattaaatccagaagttagttattttacgaataaacgaactagaggaccgttgggaattttatcaaactacgtcaagactcttcttatttctatgtattgttccaaaacatttttagacgattccaacaaacgaaaggtattggcgattgattttggaaacggtgcggacctggaaaaatacttttatggagagattgcgttattggtagcgacggatccggatgctgatgctatagctagaggaaatgaaagatacaacaaattaaactctggaattaaaaccaagtactacaaatttgactacattcaggaaactattcgatccgatacatttgtctctagtgtcagagaagtattctattttggaaagtttaatatcatcgactggcagtttgctatccattattcttttcatccgagacattatgctaccgtcatgaataacttatccgaactaactgcttctggaggcaaggtattaatcactaccatggacggagacaaattatcaaaattaacagataaaaagacttttataattcataagaatttacctagtagcgaaaactatatgtctgtagaaaaaatagctgatgatagaatagtggtatataatccatcaacaatgtctactccaatgactgaatacattatcaaaaagaacgatatagtcagagtgtttaacgaatacggatttgttcttgtagataacgttgatttcgctacaattatagaacgaagtaaaaagtttattaatggcgcatctacaatggaagatagaccgtctacaaaaaactttttcgaactaaatagaggagccattaaatgtgaaggtttagatgtcgaagacttacttagttactatgttgtttatgtcttttctaagcggtaaataataatatggtatgggttctgatatccccgttctaaatgcattaaataattccaatagagcgatttttgttcctataggaccttccaactgtggatactctgtattgttaatagatatattaatacttttgtcgggtaacagaggttctacgtcttctaaaaataaaagtttgataacatctggcctgttcataaataaaaacttggcgattctatatatactcttattatcaaatctagccattgtcttatagatgtgagctactgtaggtgtaccatttgattttctttctaatactatatatttctctcgaagaagttcttgcacatcatctgggaataaaatactactgttgagtaaatcagttattttttttatatcgatattgatggacatttttatagttaaggataataagtatcccaaagtcgataacgacgataacgaagtatttatacttttaggaaatcacaatgactttatcagatcaaaattaacaaaattaaaggagcatgtatttttttctgaatatattgtgactccagatacatatggatctttatgcgtcgaattaaatgggtctagttttcagcacggtggtagatatatagaggtggaggaatttatagatgctggaagacaagttagatggtgttctacatccaatcatatatctgaagatatgcacactgataaatttgtcatttatgatatttatacgtttgattcgttcaagaataaacgattggtatttgtacaggtgcctccatcattaggagatgatagctatttgactaatccgttattgtctccgtattatcgtaattcagtagccagacaaatggtcaatgatatgatttttaatcaagattcatttttaaaatatttattagaacatctgattagaagccactatagagtttctaaacatataacaatagttagatacaaggataccgaagaattaaatctaacgagaatatgttataatagagataagtttaaggcgtttgtattcgcttggtttaacggcgtttcggaaaatgaaaaggtactagatacgtataaaaaggtatctaatttgatataatgaattcagtgactgtatcacacgcgccatatactattacttatcacgatgattgggaaccagtaatgagtcaattggtagagttttataacgaagtagccagttggctgctacgagacgagacgtcgcctattcctgataagttctttatacagttgaaacaaccgcttagaaataaacgagtatgtgtgtgtggtatagatccgtatccgaaagatggaactggtgtaccgttcgaatcaccaaattttacaaaaaaatcaattaaggagatagcttcatctatatctagattaaccggagtaattgattataaaggttataaccttaatataatagacggggttataccctggaattattacttaagttgtaaattaggagaaacaaaaagtcacgcgatctactgggataagatttccaagttactgctgcagcatataactaaacacgttagtgttctttattgtttgggtaaaacagatttctcgaatatacgggcaaagttagaatccccggtaactaccatagtcggatatcatccagcggctagagaccgccaattcgagaaagatagatcatttgaaattatcaacgttttactggaattagacaacaaggcacctataaattgggctcaagggtttatttattaatgctttagtgaaattttaacttgtgttctaaatggatgcaactattagaggtaatgatgttatctttgttcttaagactataggtgtcccgtcagcgtgcagacaaaatgaagatccaagatttgtagaagcatttaaatgcgacgagttagaaagatatattgagaataatccagaatgtacactattcgaaagtcttagggatgaggaagcatactctatagtcagaattttcatggatgtagatttagacgcgtgtctagacgaaatagattatttaacggctattcaagattttattatcgaggtgtcaaactgtgtagctagattcgcgtttacagaatgcggtgccattcatgaaaatgtaataaaatccatgagatctaatttttcattgactaagtctacaaatagagataaaacaagttttcatattatctttttagacacgtataccactatggatacattgatagctatgaaacgaacactattagaattaagtagatcatctgaaaatccactaaccagatcgatagacactgccgtatataggagaaaaacaactcttcgggttgtaggtactaggaaaaatccaaattgcgacactattcatgtaatgcaaccaccgcatgataatatagaagattacctattcacttacgtggatatgaacaacaatagttattacttttctctacaacgacgattggaggatttagttcctgataagttatgggaaccagggtttatttcattcgaagacgctataaaaagagtttcaaaaatattcattaattctataataaactttaatgatctcgatgaaaataattttacaacggtaccactggtcatagattacgtaacaccttgtgcattatgtaaaaaacgatcgcataaacatccgcatcaactatcgttggaaaatggtgctattagaatttacaaaactggtaatccacatagttgtaaagttaaaattgttccgttggatggtaataaactgtttaatattgcacaaagaattttagacactaactctgttttattaaccgaacgaggagaccatatagtttggattaataattcatggaaatttaacagcgaagaacccttgataacaaaactaattctgtcaataagacatcaactacctaaggaatattcaagcgaattactctgtccgaggaaacgaaagactgtagaagctaacatacgagacatgttaatagattcagtggagaccgatacctatccggataaacttccgtttaaaaatggtgtattggacctggtagacggaatgttttactctggagatgatgctaaaaaatatacgtgtactgtatcaaccggatttaaatttgacgatacaaagttcgtcgaagacagtccagaaatggaagagttaatgaatatcattaacgatatccaaccattaacggatgaaaataagaaaaatagagagttgtacgaaaaaactttatctagttgtttatgcggtgctaccaaaggatgtttaacattcttttttggagaaactgcaactggaaagtcgacaaccaaacgtttgttaaagtctgctatcggtgacctgtttgttgagacgggtcaaacaattttaacagatgtattggataaaggacctaatccatttatcgctaacatgcatttgaaaagatctgtattctgtagcgaactacctgattttgcctgtagtggatcaaagaaaattagatctgacaatattaaaaagttgacagaaccttgtgtcattggaagaccgtgtttctccaataaaattaataatagaaaccatgcgacaatcattatcgatactaattacaaacctgtctttgataggatagataacgcattaatgagaagaattgccgtcgtgcgattcagaacacacttttctcaaccttctggtagagaggctgctgaaaataatgacgcgtacgataaagtcaaactattagacgaggggttagatggtaaaatacaaaataatagatatagattcgcatttctatacttgttggtgaaatggtacaaaaaatatcatgttcctattatgaaactatatcctacaccggaagagattccggactttgcattctatctcaaaataggtactctgttagtatctagctctgtaaagcatattccattaatgacggacctctccaaaaagggatatatattgtacgataatgtggttactcttccgttgactactttccaacagaaaatatccaagtattttaattctagactatttggacacgatatagagagcttcatcaatagacataagaaatttgccaatgttagtgatgaatatctgcaatatatattcatagaggatatttcatctccgtaaatatatgctcatatatttatagaagatatcacatatctaaatgaataccggaatcatagatttatttgataatcatgttgatagtataccaactatattacctcatcagttagctactctagattatctagttagaactatcatagatgagaacagaagcgtgttattgttccatattatgggatcaggtaaaacaataatcgctttgttgttcgccttggtagcttccagatttaaaaaggtttacattctagtgcctaatattaacattttgaaaatttttaattataatatgggtgtagctatgaacttgtttaatgacgaattcatagctgagaatatctttattcattccacaacaagtttttattctcttaattataacgataacgtcattaattataacggattatctcgctacaataactctatttttatcgttgatgaggcacataatatctttgggaataatactggagaacttatgaccgtgataaaaaataaaaacaagattccttttttactattgtctggatctcccattactaacacacctaatactctgggtcatattatagatttaatgtccgaagagacgatagattttggtgaaattattagtcgtggtaagaaagtaattcagacacttcttaacgaacgaggtgtgaatgtacttaaggatttgcttaaaggaagaatatcatattacgaaatgcctgataaagatctaccaacgataagatatcacggacgtaagtttctagatactagagtagtatattgtcacatgtctaaacttcaagagagagattatatgattactagacgacagctatgttatcatgaaatgtttgataaaaatatgtataacgtgtcaatggcagtattgggacaacttaatctgatgaataatttagatactttatttcaggaacaggataaggaattgtacccaaatctgaaaataaataatggcgtgttatacggagaagaattggtaacgttaaacattagttccaaatttaaatactttattaatcggatacagacactcaacggaaaacattttatatacttttctaattctacatatggcggattggtaattaaatatatcatgctcagtaatggatattctgaatataatggttctcagggaactaatccacatatgataaacggcaaaccaaaaacatttgctatcgttactagtaaaatgaaatcgtctttagaggatctattagatgtgtataattctcctgaaaacgatgatggcagtcaattgatgtttttgttttcgtcaaacattatgtccgaatcctatactctgaaagaggtaaggcatatttggtttatgactatcccagatactttttctcaatacaaccaaattcttggacgatctattagaaaattctcttacgccgatatttctgaaccagttaatgtatatcttttagccgccgtatattccgatttcaatgacgaagtgacgtcattaaacgattacacacaggatgaattaattaatgttttaccatttgacatcaaaaagctgttgtatctaaaatttaagactaaagaaacgaatagaatatactctattcttcaagagatgtctgaaacgtattctcttccaccacatccatcaattgtaaaagttttattgggagaattggtcagacaatttttttataataattctcgtattaagtataacgataccaagttacttaaaatggttacatcagttataaaaaataaagaagacgctaggaattacatagatgatattgtaaacggtcacttctttgtatcgaataaagtatttgataaatctcttttatacaaatacgaaaacgatattattacagtaccgtttagactttcctacgaaccatttgtttggggagttaactttcgtaaagaatataacgtggtatcttctccataaaactgatgagatatataaagaaataaatgtcgagctttgttaccaatggataccttccagttacattggagccacacgagctgacgttagacataaaaactaatattaggaatgccgtatataagacgtatctccatagagaaattagtggtaaaatggccaagaaaatagaaattcgtgaagacgtggaattacctctcggcgaaatagttaataattctgtagttataaacgttccgtgtgtaataacctacgcgtattatcacgttggggatatagtcagaggaacattaaacatcgaagatgaatcaaatgtaactattcaatgtggagatttaatctgtaaactaagtagagattcgggtactgtatcatttagcgattcaaagtactgcttttttcgaaatggtaatgcgtatgacaatggcagcgaagtcactgccgttctaatggaggctcaacaaggtatcgaatctagttttgtttttctcgcgaatatcgttgactcataaaaaagagaatagcggtaagtataaacacgaatactatggcaataattgcgaatgttttattcccttcgatatatttttgataatatgaaaaacatgtctctctcaaatcggacaaccatctcataaaatagttctcgcgcgctggagaggtagttgctgctcgtataatctccccagaataatatacttgcgtgtcgtcgttcaatttatacggatttctatagttctctgttatataatgcggttttccatcatgattagacgacgacaatagtgttctaaatttagatagttgatcagaatgaatgtttattggcgttggaaaaattatccatacagcgtctgcagagtggttgatagttgttcctagatatgtaaaataatccaacttactaggcagcaaattgtctagataaaatactgaatcaaacggtgcagacgtattggtggatctaatggaatccaattgattaactatcttttgaaaatatacatttttatgatccgatacttgtaagaatatagaaataatgataagtccatcatcgtgtttttttgcctcttcataagaactatattttttcttattccaatgaacaagattaatctctccagagtatttgtacacatctatcaagtgattggatccataatcgtcttcctttccccaatatatacgtagtgatgataacacatattcattggggagaaaccctccacttatatatcctcctttaaaattaatccttactagttttccagtgttctggatagtggttggtttcgactcattataatgtatgtctaacggcttcaatcgcgcgttagaaattgcttttttagtttctatattaataggagatagttgttgcggcatagtaaaaatgaaatgataactgtttaaaaatagctcttagtatgggaattacaatggatgaggaagtgatatttgaaactcctagagaattaatatctattaaacgaataaaagatattccaagatcaaaagacacgcatgtgtttgctgcgtgtataacaagtgacggatatccgttaataggagctagaagaacttcattcgcattccaagcgatattatctcaacaaaattcagattctatctttagagtatccactaaactattacggtttatgtactacaatgaactaagagaaatctttagacggttgagaaaaggttctatcaacgatatcgatcctcactttgaagagttaatattattgggtggtaaactagataaaaaggaatctattaaagattgtttaagaagagaattaaaagaggaaagtgatgaacgtataacagtaaaagaatttggaaatgtaattctaaaacttacaacacgggataaattatttaataaagtatatataagttattgcatggcgtgttttattaatcaatcgttggaggatttatcgcatactagtatttacaatgtagaaattagaaagattaaatcattaaatgattgtattaacgacgataaatacgaatatctgtcttatatttataatatgctagttaatagtaaatgaacttttacagatctagtataattagtcagattattaagtataatagacgactagctaagtctattatttgcgaggatgactctcaaattattacactcacggcattcgttaaccaatgcctatggtgtcataaacgagtatccgtgtccgctattttattaactactgataacaaaatattagtatgtaacagacgagatagttttctctattctgaaataattagaactagaaacatgtctagaaagaaacgattatttctgaattattccaattatttgtccaaacaggaaagaagtatactatcgtcatttttttctctagatccagctactactgataatgatagaatagatgctatttatccgggtggcatacccaaaaggggtgagaatgttccagagtgtttatccagggaaattaaagaagaagttaatatagacaattcttttgtattcatagacactcggttttttattcatggcatcatagaagataccattattaataaattttttgaggtaatcttctttgtcggaagaatatctttaacgagtgatcaaatcattgatacatttaaaagtaatcatgaaatcaaggatctaatatttttagatccgaattcaggtaatggactccaatacgaaattgcaaaatatgctctagatactgcaaaactcaaatgttatggccatagaggatgttattacgaatcattaaaaaaattaactgaggatgattgattagaaaatataaattaatttaccatcgtgtatttttataacgggattgtccggcatatcatgtagatagttaccgtctacatcgtatactcgaccatctacgcctttaaatcctctatttattgacattaatctattagaattggaataccaaatattagtaccctcaattagtttattggtaatattttttttagacgatagatcgatggctcttgaaaccaaggttttccaaccggactcattgtcgatcggtgagaagtctttttcattagcatgaatccattctaatgatgtatgtttaaacactctaaacaattggacaaattcttttgatttgctttgaatgatttcaaataggtcttcgtctacagtaggcataccattagataatctagccattataaagtgcacgtttacatatctacgttctggaggagtaagaacgtgactattgagacgaatggctcttcctactatctgacgaagagacgcctcgttccatgtcatatctaaaatgaagatatcattaattgagaaaaaactaataccctcgcctccactagaagagaatacgcatgttttaatgcattctccgttagtgtttgattcttggttaaactcagccaccgccttgattctagtatcttttgttctagatgagaactctatattagagataccaaagactttgaaatatagtaataagatttctattcctgactgattaacaaatggttcaaagactagacatttaccatgggatgctaatattcccaaacatacatctataaatttgacgcttttctcttttaattcagtaaatagagagatatcagccgcactagcatcccctttcaatagttctccctttttaaaggtatctaatgcggatttagaaaactctctatctcttaatgaatttttaaaatcattatatagtgttgctatctcttgcgcgtattcgcccggatcacgattttgtctttcaggaaagctatcgaacgtaaacgtagtagccatacgtctcagaattctaaatgatgatatacctgtttttatttcagcgagtttagccttttgataaatttcttcttgctttttcgacatattaacgtatcgcattaatactgttttcttagcgaatgatgcagacccttctacgtcatcaaaaatagaaaactcgttattaactatgtacgaacataggcctcctagtttggagactaattctttctcatcaactagacgtttattctcaaatagcgattggtgttgtaaggatcctggtcgtagtaagttaaccaacatggtgaattcttgcacactattaacgataggtgtagccgataaacaaatcatcttatggttttttaatgcgatggtcttagataaaaaattatatactgaacgagtaggacggatcttaccatcttctttgattaatgatttagaaatgaagttatgacattcatcaataatgacgcatattctactcttggaattaatagttttgatattagtaaaaaatttatttctaaaattttgatcatcgtaattaataaaaatacaatccttcgttatctctggagcgtatctgagtatagtgttcatccaaggatcttctatcaaagcctttttcaccaataagataatagcccaattcgtataaatatccttaagatgtttgagaatatatacagtagtcattgttttaccaacacccgtttcatggaacaataaaagagaatgcatactgtctaatcctaagaaaactcttgctacaaaatgttgataatccttgaggcgtactacgtctgttcccatcatttcaacaggcatattagtagttctgcgcaatgcataatcgatataggccgcgtgtgatttactcatttatgagtgataagtaataactatgttttaaaaatcacagcagtagtttaactagtcttctctgatgtttgttttcgatactttttgaatcagaagtcatactagaataaagcaacgagtgaacgtaatagagagcttcgtatactctattcgaaaactctaagaacttattaatgaattccgtatccactggattgtttaaaatactaaattgaacactgttcacatccttccaagaagaagacttagtgacggacttaacatgagacataaataaatccaaattttttttacaaacatcactagccaccataatggcgctatctttcaaccagctatcgcttacgcattttagcagtctaacatttttaaagagactacaatatattctcatagtatcgattacacctctaccgaataaagttggaagtttaataatacaatatttttcgtttacaaaatcaaataatggtcgaaacacgtcgaaggttaacatcttataatcgctaatgtatagattgttttcagtgagatgattattagatttaatagcatctcgttcacgtttgaacagtttattgtgtgcgctgaggtcggcaactacggcgtccgctttagtactcctcccataatactttacgctattaatctttaaaatttcatagactttatctagatcgctttctggtaacatgatatcatgtgtaaaaagttttaacatgtcggtcggcattctatttagatcattaactctagaaatctgaagaaagtaattagctccgtattccagactaggtaatgggcttttacctaaagacaagttaagttctggcaatgtttcataaaatggaagaaggacatgcgttccctcccggatattttttacaatttcatccatttacaactctatagtttgttttcattattattagttattatctcccataatcttggtaatacttaccccttgatcgtaagataccttatacaggtcattacatacaactaccaattgtttttgtacataatagattggatggttgacatccatggtggaataaactactcgaacagatagtttatctttccccctagatacattggccgtaatagttgtcggcctaaagaatatctttggtgtaaagttaaaagttagggttcttgttccattattgctttttgtcagtagttcattataaattctcgagatgggtccgttctctgaatatagaacatcatttccaaatctaacttctagtctagaaataatatcggtcttattcttaaaatctattcccttgatgaagggatcgttaatgaacaaatccttggcctttgattcggctgatctattatctccgttatagacgttacgttgactagtccaaagacttacaggaatagatgtatcgatgatgttgatactatgtgatatgtgagcaaagattgttctcttagtggcatcactatatgttccagtaatggcggaaaactttttagaaatgttatatataaaagaattttttcgtgttccaaacattagcagattagtatgaagataaacactcatattatcaggaacattatcaatttttacatacacatcagcatcttgaatagaaacgataccatcttctggaacctcaacaatctcggcagactccggataaccagtcggtgggccatcactaacaataactagatcatccaacaatctactcacatatgcatctatataatctttttcatcttgtgagtaccctggatacgaaataaatttattatccgtatttccataataaggtttagtataaacagagagcgatgttgccgcatgaacttcagttacagtcgccgttggttggtttatttgacctattactctcctaggtttctctataaacgatggtttaatttgtacattcttaaccatatatccaataaagctcaattcaggaacataaacaaattctttgttgaacgtttcaaagtcgaacgaagagtcacgaataacgatatcggatactggattgaaggttaccgttacggtaatttttgaatcggatagtttaagactgctgaatgtatcttccacatcaaacggagttttaatataaacgtatactgtagatggttctttaatagtgtcattaggagttaggccaatagaaatatcattaagttcactagaatatccagagtgtttcaaagcaattgtattattgatacaattattatataattcttcgccctcaatttcccaaataacaccgttacacgaagagatagatacgtgattaatacatttatatccaacatatggtacgtaaccgaatcttcccatacctttaacttctggaagttccaaactcagaaccaaatgattaagcgcagtaatatactgatccctaatttcgaagctagcgatagcctgattgtctggaccatcgtttgtcataactccggatagagaaatatattgcggcatatacaaagttggaatttgactatcgactgcgaagacattagaccgtttaatagagtcatccccaccgatcaaagaattaatgatagtattattcattttctatttaaaatggaaaaagcttacaataaactccgtagagaaatatctataatttgtgagttttccttaaagtaacagcttccgtaaacgccgtctttatctcttagtaggtttattgtatttatgaccttttccttatcttcatagaatactaaaggcaacaaagaaatttttggttcttctctaagagctacgtgagacttaaccatagaagccaacgaatccctacatattttagaacagaaatacccaacttcaccacccttgaatgtctcaatactaataggtctaaaaaccaaatcttgattacaaaaccaacacttatcaattacactatttgtcttaatagacacatctgccatagatttataatactttggtagtatacaagcgagtgcttcttctttagcgggcttaaagactgctttaggtgctgaaataaccacatctggaaggcttactcgcttagccatttaattacggaactatttttttatacttctaatgagcaagtagaaaacctctcatctacaaaaacatactcgtgtccataatcctctaccatagttacacgttttttagatctcatatgtgctaaaaagttttcccatactaattggttactattatttttcgtataatttttaacagtttgaggttttagatttttagttacagaagtgatatcgaatattttatccaaaaagaatgaataattaattgtcttagaaggagtgttttcttggcaaaagaataccaagtgcttaaatatttctactacttcattaatcttttctgtactcagattcagtttctcatcttttacttgattgattatttcaaagactaacttataatcctttttatttattctctcgttagccttaagaaaactagatacaaaatttgcatctacatcatccgtggatatttgatttttttccatgatatccaagagttccgagataatttctccagaacattgatgagacaataatctccgcaatacatttctcaaatgaataagtttattagacacatggaagtttgactttttttgtacctttgtacatttttgaaatacagactcgcaaaaaatacaatattcatatccttgttcagatactataccgttgtgtctacaaccgctacataatcgtagattcatgttaacactctacgtatctcgtcgtccaatattttatataaaaacattttatttctagacgttgccagaaaatcctgtaatatttttagttttttgggctgtgaataaagtatcgccctaatatggttaccgtcctccgccaatatagtagttaaattatccgcacatgcagaagaacaccgcttaggcggattcagtacaatgttatatttttcgtaccaactcatttaaatatcataatctaaaatagttctgtaatatgtctagcgctaatatattgatcataatcctgtgcataaattaagatacaacaatgtctcgaaatcatcgacatggcttcttccatagttagaagatcgtcgtcaaagttagcaacgtgattcatcaacatttgctgttttgaggcagcaaatactgaaccgtcgccattcaaccattcataaaaaccatcgtctgaatccattgataatttcttgtactggtttttgagagctcgcatcaatctagcatttctagctcccggattgaaaacagaaagaggatcgtacatccagggtccattttctgtaaatagaatcgtataatgtcccttcaagaagatatcagacgatccacaatcaaagaattggtctccgagtttgtaacaaactgcggactttaacctatacatgataccgtttagcatgatttctggtgatacgtcaatcggagtatcatctattagagatctaaagccggtgtaacattctccaccaaacatattcttattctgacgtcgttctacataaaacatcattgctccattaacgataacaggggaatgaacagcactacccatcacattagttcccaatggatcaatgtgtgtaactccagaacatcttccatatcctatgttaggaggagcgaacaccactcttccactattgccatcgaatgccatagaataaatatccttggaattgatagaaatcggactgtcggatgttgtgatcatcttcataggattaacaactatgtatggtgccgcctgaagtttcatatcgtaactgatgccgtttataggtctagccacagaaaccaacgtaggtctaaatccaactatagacaaaatagaagccaatatctgttcttcatctgtcataacttgagagcatccagtatgaataatcttcattagatggggatctaccgcatcatcatcgttacaataaaaaattcccattctaatgttcataattgcttttctaatcatggtatgcatgtttgctctctgaatctctgtggaaattagatctgatacacctgtaatcactatcggattatcctccgtaagacgattaaccaacaacatataattataagactttacttttctaaattcataaagttgctggattaggctataggtgtctccatgtacatacgcgttctcgagcgcaggaagtttaataccgaatagtgccatcagaataggatgaatatagtaattagtttctggttttctataaataaaagacaaatcttgtgaactagacatatcggtaaaatgcatggattggaatcgtgtagtcgacagaagaatatgatgattagatggagagtatattttatctaactctttgagttggtcaccgattctaggactagctcgagaatgaataagtactaaaggatgagtacatttcacagaaacactagcattgttcaatgtgctctttacatgggtaaggagttgaaatagctcgtttctatttgttctgacaatatttagtttattcataatgttaagcatatcctgaatagtaaagttagatgtgtcatacttgttagtagttagatatttagcaattgcattcccatcatttctcaatctcgtactccaatcatgcgtggatgctacttcgtcgatggaaaccatacaatcctttttgataggctgttgagattgattatttcctgcacgtttaggtttggtacgttgatttctagcccctgcggatataaagtcatcgtctacaattttggataatgaattgcatacactacaagacaaagatttatcagaagtgtgaatatgatcttcatctaccaaagaaagagtttgattagtataactagattttagtcctgcgttagatgttaaaaaaacatcgctattgaccacggcttccattatttatattcgtagtttttactcgaaagcgtgattttaatattcaatcttattacttttggaatcgttcaaaacctttgactaattgtagaatttgatctattgccctacgcgtatactcccttgcatcatatacgttcgtcaccagatcgtttgtttcggcctgaagttggtgcatatctctttcaacattcgacatgagatccttaagggccatatcgtctagattttgttgagatgctgctcctggatttggattttgttgtgctgttgtacatactgtaccaccagtaggtgtaggagtacatacagtggccacaataggaggttgaggaggtgtaaccgttggagtagtacaagaaatacttccatccgattgttgtgtacatgtagttgttggtaacgtctgagaaggttgggtagatggcggcgtcgtcgtcttttgatctttattaaatttagagataatatcctgaacagcattgctcggcgtcaacgctggaaggagtgaactcgccggcgcatcagtatctgcagacagccaatcaaaaagattagacatatcagatgatgtattagtttgttgtcgtggttttggtgtaggagccggtgtagctgttggaaccggctgtggagttatatgaatagttggttgtagcggttggataggctgtctgctggcggccatcatattatctctagctagttgttctcgcaactgtctttgataatacgactcttgagactttagtcctatttcaatcgcttcatcctttttcgtatccggatccttttcttcagaataatagattgacgactttggtgtagaggattctgccagcccctgtgagaacttgttaaagaagtccatttaaggctttaaaattgaattgcgattataagattaaatggcagacacagacgatattatcgactatgaatccgatgatctcaccgaatacgaggatgatgaagaagaggaagaagatggagagtcactagaaactagtgatatagatcccaaatcttcttataagattgtagaatcagcatccactcatatagaagatgcgcattccaatcttaaacatatagggaatcatatatctgctcttaaacgacgctatactagacgtataagtctatttgaaatagcgggtataatagcagaaagctataacttgcttcaacgaggaagattacctctagtttcagaattttctgacgaaacgatgaagcaaaatatgctacatgtaattatacaagagatagaggagggttcttgtcctatagtcatcgaaaagaacggagaattgttgtcggtaaacgattttgacaaagatggtctaaaattccatctagactatattatcaaaatttggaaacttcaaaaacgatattagaatttatacgaatatcgttctctaaatgtcacaatcaagtctcgcatgttcagcaatttattgtcgtactttatatcgtgttcattaacgatatcttgcaaaatagtaatgattctatcttccttcgatagatattcttcagagattattgtcttatattctttcttgttatcagatatgaatttgataagactttgaacattattgatacccgtctgtttaattttttctacagatattttagttttggcagattctatcgtatctgtcaatagacatccaacatcgacattcgacgtcaattgtctataaatcaacgtataaattttagaaataacattagcgaattgttgtgcattgatgtcgttattctgaaacagtatgattttaggtagcattttcttaacaaagagaacgtatttattgttactcagttgaacagatgatatatccagattactaacgcatctgattccatataccaaactttcagaagaaatggtgtacaattgtttgtattcattcaatgtctctttttcagaaattagtttagagtcgaatactgcaataattttcaagagatagttttcatcagataagattttatttagtgtagatatgataaaactattgttttgttggagaacttgatacgccgcgttctctgtagtcgacgctctcaaatgggaaacaatctccattatttttttggaatcggatacaatatcttcggtatcttgacgcaatctagtatacatagagttaagagaaattagagtttgtacattaagcaacatgtctctaaatgtggctgcaaacttttccttttccacatcatctagtttattatataccgatttcacaacggcaccagatttaaggaaccagaatgaaaaactctgataactacaatatttcatcatagttacgattttatcatcttctatagttggtgtaatagcgcatacctttttctccaagactggaaccaacgtcataaaaatgtttaaatcaaaatccatatcaacatctgatgcgctaagaccagtctcgcgttcaagattatctttactaatggtgacgaactcatcgtatagaactctaagtttgtccattatttatttacagatttagttgtttaatttatttgtgctcttccagagttgggatagtatttttctaacgtcggtattatattattaggatctacgttcatatgtatcataatattaatcatccacgttttgataaatctatctttagcttctgaaataacgtatttaaacaaaggagaaaaatatttagctacggcatcagacgcaataacattttttgtaaatgtaacgtatttagacgacagatcttcgttaaaaagttttccatctatgtagaatccatcggttgttaacaccattcccgcgtcagattgaataggagtttgaatagtttgttttggaaatagatccttcaataacttatagttgggtgggaaaaaatcgattttatcactagactctttcttttttactatcattacctcatgaactatttcttgaatgagtatatgtattttctttcctatatcggacgcgttcattggaaaatataccatgtcgttaactataagaatatttttatcctcgtttacaaactgaataatatcagatgtagttcgtaaacgaactatatcatcaccagcacaacatctaactatatgatatccactagtttcctttagtcgtttattatcttgttccatattagcagtcattccatcatttaagaaggcgtcaaagataatagggagaaatgacattttggattctgttacaactttaccaaaattaaggatatacggacttactatctttttctcaacgtcgatttgatgaacacacgatgaaaatgtacttcgatgagattgatcatgtagaaaacaacaagggatacaatatttccacatatcatgaaatatattaagaaatcccaccttattatatttccccaaaggatccatgcatgtaaacattatgccgttatcattaataaagacttctttctcatcggatctgtaaaagttgttactgatttttttcattccaggatctagataattaataatgatgggttttctattcttattctttgtattttggcatatcctagaccagtaaacagtttccactttggtaaaatcagcagacttttgaacgctattaaacatggcattaatggcaataactaaaaatgtaaaatatttttctatgttaggaatatggtttttcactttaatagatatatggtttttggccaaaatgatagatatttttttatccgaggatagtaaaatattattagtcgccgtctctataaaaatgaagctagtctcgatatccaattttattctagaattgataggagtcgccaaatgtaccttatacgttatatctcccttgatgcgttccatttgtgtatctatatcggacacaagatctgtaaatagttttacgttattaatcatcacggtatcgccgtcgctagataacgctaatgtaccatccaagtcccaaatggagagatttaactgttcatcgtttagaataaaatgattaccggtcatattaataaagtgttcatcgtatctagataacaacgacttataattaatgtccaagtcttgaactcgctgaatgatcttttttaacccagttagttttagattggtacgaaatatattgttaaactttgattctacagtaatgtccaaatctagttgtggaaatacttccatcaacattgtttcaaacttgataatattattatctacatcttcatacgatccaaattccggaatagatgtatcgcacgctctggccacccagataaccaaaaagtcacacgctccaggatatacattgtataaaaagctatcgttttttagtagtgtttttttctgagtatatacgaagggattaaaaatagtattatcaacgtaactatattccaaattattcttatgagaatagataataatatcgtccttaatatctaacaaatttcctaaatatccctttaattgagtcattcgaagcgtcaatagaatatgtctcttaactatttccggctgttgtatatttaaatgacttcgtaaaaaataatatatgggcgacttctcatctatgtaatcatatggagtgagatatagggctcgttctacctcctgccccttacccacctgtaataccaattgcggacttactatatatcgcatatttatatcgtggggtaaagtgaaaatctactaccgatgatgtaagtcttacaatgttcgaaccagtaccagatcttaatttggaggcctccgtagaactaggggaggtaaatatagatcaaacaacacctatgataaaggaaaatagcggttttatatcccgtagtagacgtctattcgcccatagatctaaggatgatgagagaaaactagcactacgattctttttacaaagactttattttttagatcatagagagattcattatttgttcagatgcgttgacgctgtaaaagacgtcactattaccaaaaaaaataacattatcgtggcgccttatatagcacttttaactatcgcatcaaaaggatgcaaacttacagaaacaatgattgaagcattctttccagaactatataatgaacatagtaagaaatttaaattcaactctcaagtatccatcatccaagaaaaactcggataccagtttggaaactatcacgtttatgattttgaaccgtattactctacagtagctctggctattcgagatgaacattcatctggcatttttaatatccgtcaagagagttatctggtaagttcattatctgaaataacatatagattttatctaattaatctaaaatctgatcttgttcaatggagtgctagtacgggcgctgtaattaatcaaatggtaaatactgtattgattacagtgtatgaaaagttacaactggtcatagaaaatgattcacaatttacatgttcattggctgtggaatcaaaacttccaataaaattacttaaagatagaaatgaattatttacaaaattcatcaacgagttaaaaaagaccagttcattcaagataagcaaacgcgataaggatacgctactaaaatattttacttaggactggagttagaatttatagacgactcatttcgtttatcattattagtattcttcttgttatcttgttcagaaatatacagcaatgctatgcctaatactaaatacattatcatgcttgcaatggctctaacaacgacgaaccaaaatgaatttggtcgtagcttttgttcacaaaaatacataaagaaatgtctacataaatctatggcgccattggctacttgaaatagcgccagtcctcctacagattttaatatagctgtataacatgacatttattcatcatcaaaagagacagagtcaccatctgtcatatttagattttttttcatgtgttcaaagtatcctctactcatttcattataatagtttatcatacttagaattttaggacggatcaatgagtaagacttgactagatcgtcagtagtaatttgtgcatcgtctattctgcatccgcttcgtcgaataatgtatagcatcgctttgagattctccatagctatcaagtctttatacaatgacatggaaatatctgtgaatactttatacttctccaacatcgatgccttaacatcatcgcctactttagcattgaaaatacgttctattgtgtagatggatgtagcaagatttttaaacaacaatgccattttacacgatgattgcctcaagtctccaatcgtttgtttagaacgattagctacagagtccaatgcttggctgactagcatattattatctttagaaattgtattcttcaatgaggcgtttatcatatctgtgatttcgttagtcatattacagtctgactgggttgtaatgttatccaacatatcacctatggatacggtacacgtaccagcatttgtaataatcctatctaagatgttgtatggcattgcgcagaaaatatcttctcctgtaatatttccactctcgataaatctactcagattattcttaaatgccttattctctggagaaaagatatcagtgtccatcatttcattaatagtatacgcagaaaagataccacgagtatcaattctatccaagatacttatcggttccgagtcacagataatggtttcctctccttcgggagatcctgcatagaaatatctaggacaatagtttctatactgtctgtaactctgataatctctaaagtcactaactgataccatgaaattgagaagatcaaacgctgaagtaattaatttttctgcctcgtttttactacaactagttttcatcaatgtagtgacgatgtattgtttagttactcttggtctaatactgatgatagagatattattacttcccataatggatcttctagtagtcaccttaaagcccattgatgcaaatagcagatagataaagtcttggtatgactcctttctaatatagtacggactacctttgtcacccaactttatacccacataagccataacaacctctttaatagccgtttcatgaggtttatcagccatgagcctgagtagttggaagaatctcatgaatcctgtctcagaaagtcctatatgcatgatagatttatctttcctgggaaactctcgtatagtcatagatgaaatactcttcaaagtttctgaaataagattagtaacagtcttacctccgactactctaggtaacaaacaaactctaataggtgttttctctgcggagataatatcagaaaggatagagcaataagtagtattattgtgattataaagaccgaatacataacaggtagaatttataaacatcatgtcctgaaggtttttagacttgtattcctcgtaatccataccgtcccaaaacatggatttggtaactttgatagccgtagatctttgttccttcgccaacaggttaaagaaattaataaagaatttgtggtttctacctatgtctacaaattgcacgtttggaagcgccacggttacattcactgcagcattttgaggatcgcgagtatgaagtacgatgttattgtttactggtatatctggaaagaattctaccagtctaggaataagagattgatatcgcatagaaatacaaaagttcataatctcatcatctaagagcattttgttaccattgtaataaatatccactctgtcatatgtataaatgaagtactgttcaaacatgatgagatgtttatatgttggcatagtagtgagatctacgtttggtaatggcaatgtattaagattaactccataatgtctagcagcatctgcgatgttataagcgttgtcaaagcggggtcgatcttgtgctgttatatattgtctaacacctataagattatcaaaatcttgtctgcttaatacaccgttaacaatttttgccttgaattcttttattggtgcattaataacatccttatagaggatgttaaacaaataagtgttatcaaagttaagatctggatatttcttttctgctagaacatccattgagtcggagccatctggtttaatataaccaccgataaatctagctctgtattctgtatccgtcaatctaatattaagaaggtgttgagtgaaaggtggaagatcgtaaaagctgtgagtattaatgataggattagtttccgaactaatgttaattggggtattaataatatctatatttccagcgttaagtgtaacattaaacagttttaattcacgtgacgtggtatcaattaaataattaatgcccaatttggatatagcagcctgaagctcatcttgtttagttacggatcctaatgagttattaagcaatatatcgaacggatgaacgaaggttgttttaagttggtcacatactttgtaatctagacatagatgcggaagaacggtagaaactatacgaaataaatattcagagtcctctaattgatcaagagtaactattgacttaataggcatcatttatttagtattaaatgacgaccgtaccagtgacggatatacaaaacgatttaattacagagttttcagaagataattatccatctaacaaaaattatgaaataactcttcgtcaaatgtctattctaactcacgttaacaacgtggtagatagagaacataatgccgccgtagtgtcatctccagaggaaatatcctcacaacttaatgaagatctatttccagatgatgattctccggccactattatcgaacgagtacaacctcatactactattattgacgatactccacctcctacgtttcgtagagagttattgatatcggaacaacgtcaacaacgagaaaaaagatttaatattacagtatcgaaaaatgctgaagcaataatggaatctagatctatgatatcttctatgccaacacaaacaccatccttgggagtagtttatgataaagataaaagaattcagatgttggaggatgaagtggttaatcttagaaatcaacgatctaatacaaaatcatctgataatttagataattttaccagaatactatttggtaagactccgtataaatcaacagaagttaataagcgtatagccatcgttaattatgcaaatttgaacgggtctcccttatcagtcgaggacttggatgtttgttcagaggatgaaatagatagaatctataaaacgattaaacaatatcacgaaagtagaaaacgaaaaattatcgtcactaacgtgattattattgtcataaatattatcgagcaagcattgctaaaactcggatttgaagaaatcaaaggactgagtaccgatatcacttcagaaattatcgatgtggagatcggagatgactgcgatgctgtagcatcaaaactaggaatcggtaacagtccggttcttaatattgtattgtttatactcaagatattcgttaaacgaattaaaattatttaatttaatacattcccatatccagacaacaatcgtctggattaatctgttcctgtcgtctcataccggacgacatattaatctttttattagtaggcatctttttagatggtttctttttcccagcattaactgagtcgatacctagaagatcgtgattgatctctccgaccattccacgaacttctaattggccgtctctgacggtaccataaactattttaccagcattagtaacagcttggacaatctgaccatccatcgcattgtacgatgtagtagtaactgttgttctacgtctaggagcaccagaagtatttttggagcccttggatgttgatgtagaagaagacgaggattttgattttggtttacatgtaatacattttgtatcacatgcgccggcagtcacatctgtttgagaattaagattattgttgcctcctttgacggctgcatctccaccgatttgcgctagtagatttttaagctgtggtgtaatcttattaactgtttcgatataatcatcgtaactgcttctaacggctaaattttttttatccgccatttagaagctaaaaatatttttatttatgcagaagatttaactagattatacaatgaactaatatgatccttttccagattatttacaaacttggtattttttggttctggaggaggcgaatttaaattcggacttggatttggattttgtgggttcttgatcttattatacagcgcatataggatggcgacggtaactgctacgcaaataccgatcaacaaaagaataccaatcatttattgacaataacttcactattgatcaagtatgcaatatatcatcttttcactaaataagtagtaataatgattcaacaatgtcgagatatatggacgataataatttagttcatggaaatatcgctatgattggtatgaatgactccgctaactctgtggggcgcgcagtgctttccccacatagaataaattagcattccgactgtgataataataccaagtataaacgccataatactcaatactttccatgtacgagtgggactggtagacttactaaagtcaataaaggcgaagatacacgaaagaatcaaaagaatgattccagcgattagcacgccggaaaaataatttccaatcataagcatcatatccatttaactaataaaaattttaaatcgccgaatgaacaaagtggaatataaaccatataaaaacaatagtttgtactgcaaaaataatatctatttttgttttcgaagatatggtaaaattaaatagtagtacacagcatgttataactaacagcagcaacggctcgtaattacttatcatttactagacgaaaaggtggtgggatattttcttgctcaaataatacgaatatatcacccatccattttatgcgatgtttatatactctaatctttaatagatctatagacgacgggtttaccaacaatatagattttatcgattcatctaatttaaacccttccttaaacgtgaatgatctattatctggcataacgatgactctacccgatgaatcggacaatgtactgggccatgtagaataaattatcaacgaattatcgtctacgaacatttatatcatttgttttaattttagtacgcgaataaatagatataaaatagaaaataacagatattacaaccaatgttatggccgcgcccaaccaggtaggcagttttattttatcttttactacaggttctcctggatgtacgtcaccaacggcggacgtagttctagtacaattagacgtaagttccgcttgggaattttttaacgctaaagagttaacgttaatcgtgcacccaacgtatttacatctagttctttgaacatcttgattataatataaccattttctatctctagattcgtcggtgcactcatgtaaccaacataccctaggtcctaaatatttatctccggaattagattttggataattcgcgcaccaacaatttctatttcctttatgatcgttacaaaagacgtataatgccgtatccccaaaagtaaaataatcaggacgaataattctaataaactcagaacaatatctcgcatccatatgtttggagcaaatatcggaataagtagacatagccggtttccgttttgcacgtaaccattctaaacaattggggtttccaggatcgtttctacaaaatccagtcatgaaatcatcacaatgttctgtcttgtaattattattaaatatttttggacagtgtttggtatttgtcttagaacaacattttgccacgctatcactatcgcccaggagataatccttttttataaaatgacatcgttgcccggatgctatataatcagtagcgtgttttaaatccttaatatattcaggagttacctcgttctgataatagattaatgatccaggacgaaatttgaaagaactacatggttctccatgaattaatacatattgtttagcaaattcaggaactataaaactactacaatgatctatcgacataccatctatcaaacaaaacttgggtttaatttctcccggagatgtttcataatagtacgtataactttcttctgcaaacttaacagctctattatattcaggataattaaaacctaattccatatatttgtctcgtatatctgctattcctggtgctattttgattctattaagagtaacggctgcccccatttttaataatcgtcagtatttaaactgttaaatgttggtatatcaacatttaccttatttcccgcagtataaggtttgttgcaggtatactgttcaggaatggttacatttatactttttctatagtcctgtctttcgatgttcatcacatatgcaaagaacagaataaacaaaataatgtaagaaataatattaaatatctgtgaattcgtaaatacattgattgccataataattacagcagctacaatacatacaatagacattcccacagtgttgccattacctccacgatacatttgagttactaagcaataggtaataactaagctagtaagaggcaatagaaaagatgagataaatatcatcaatatagagattagaggagggctatatagagccaagacgaacaaaatcaaaccgagtaacgttctaacatcattatttttgaagattcccaaataatcattcattcctccataatcgttttgcatcatacctccatctttaggcataaacgattgctgctgttcctctgtaaataaatctttatcaagcactccagcacccgcagagaagtcgtcaagcatattgtaatatcttaaataactcatttatatattaaaaaatgtcactattaaagatggagtataatctttatgccgaactaaaaaaaatgacttgtggtcaacccctaagtctttttaacgaagacggggatttcgtagaagttgaaccgggatcatcctttaagtttctgatacctaagggattttacgcctctccttccgtaaagacgagtctagtatttgaaacattaacaacgaccgataataaaattactagtatcaatccaacaaatgcgccaaagttatatcctcttcaacgcaaagtcgtatctgaagtagtttctaatatgaggaaaatgatcgaatcaaaacgtcctctatacatcactcttcacttggcgtgtggatttggtaagactattaccacgtgttatcttatggctacacacggtagaaaaaccgtcatttgcgtacccaataaaatgttaatacatcaatggaagacacaggtagaggcagtcggattggaacataagatatccatagatggagtaagtagtctattaaaggaactaaagactcaaagtccggatgtattaatagtagtcagtagacatctgacaaacgatgccttttgtaaatatatcaataagcattatgatttgttcatcttggatgaatcacatacgtataatctgatgaacaatacagcagttacaagatttttagcgtattatcctccgatgatgtgttattttttaactgctacacctagaccatctaacagaatttattgtaacagtattattaatattgccaagttatccgatctaaaaaaaactatctatgcagtagatagtttttttgagccatattccacagataatattagacatatgataaaacgattagatggaccatctaataaatatcatatatataccgagaagttattatctgtagacgagcctagaaatcaacttattcttaataccctggtagaagaattcaagtcaggaactattaatcgcattttagttattactaaactacgtgaacatatggtattcttctacaaacgattattagattttttcggatcagaggttgtatttataggagacgcccaaaatagacgtactccagatatggtcaaatcaatcaaggaactaaatagatttatattcgtatccaccttattttattccggtactggtttagatattcctagtttggattctttgttcatttgctcggcagtaatcaacaatatgcaaatagagcaattactagggagggtatgtcgagaaacagaactattagataggacggtatatgtatttcctagcacatccatcaaagaaataaagtacatgataggaaatttcgttcaacgaattattagtctgtctgtagataaactaggatttaaacaaaaaagttatcggaaacatcaagaatccgatcccacttctgtatgtacaacatcctccagagaagaacgtgtattaaatagaatatttaactcgcaaaatcgttaagaagtttaagcgacgatccgcatgctgcgcaggccagtgtattacccctcatagtattaatataatccaatgatacttttgtgatgtcggaaatcttaaccaatttagactgacaggcagaacacgtcatgcaatcatcatcgtcatcgataactgtagtcttgggcttctttttgcggctcttcattccggaacgcacattggtgctatccatttaggtagtaaaaaataagtcagaatatgccctatagcacgatcgtgcaaaacctggtatatcgtctctatctttatcacaatatagtgtatcgacatctttattattattgacctcgtttatcttggaacatggaatgggaacatttttgttatcaacggccacctttgccttaattccagatgttgtaaaattataactaaacagtctatcatcgacacaaatgaaattcttgtttagacgtttgtagtttacgtatgcggctcgttcgcgtctcattttttcagatattgcaggtactataatattaaaaataagaatgaaataacataggattaaaaataaagttatcatgacttctagcgctgatttaactaacttaaaagaattacttagtctgtacaaaagtttgaaattttcagattctgcggctatagaaaagtataattctttggtagaatggggaacatctacttactggaaaataggcgtgcaaaaggtagctaatgtcgagacgtcaatatctgattattatgatgaggtaaaaaataaaccgtttaatattgatccgggctattacattttcttaccggtatattttgggagcgtctttatttattcgaagggtaaaaatatggtagaacttggatctggaaactcttttcaaataccagatgatatgcgaagtgcgtgtaacaaagtattagacagcgataacggaatagactttctgagatttgttttgttaaacaatagatggataatggaagatgctatatcaaaatatcagtctccagttaatatatttaaactagctagtgagtacggattaaacatacccaaatatttagaaattgaaatagaggaagacacattatttgacgacgagttatactctattatagaacgctctttcgatgataaatttccaaaaatatccatatcgtatattaagttgggagaacttaggcggcaagttgtagactttttcaaattctcattcatgtatattgagtccatcaaggtagatcgtataggagataatatttttattcctagcgttataacaaaatcaggaaaaaagatattagtaaaagatgtagaccatttaatacgatccaaggttagagaacatacatttgtaaaagtaaaaaagaaaaacacattttccattttatacgactatgatggaaacggaacagaaactagaggagaagtaataaaacgaattatagacactataggacgagactattatgttaacggaaagtatttctctaaggttggtagtgcaggcttaaagcaattgactaataaattagatattaatgagtgcgcaactgtcgatgagttagttgatgagattaataaatccggaactgtaaaacgaaaaataaaaaaccaatcagcatttgatttaagcagagaatgtttgggatatccagaagcggattttataacgttagttaataacatgcggttcaaaatagaaaattgtaaggttgtaaatttcaatattgaaaatactaattgtttaaataacccgagtattgagactatatatggaaactttaaccagttcgtctcaatctttaatatcgtcaccgatgtcaaaaaaagattattcgagtgaaataatatgcgcctttgatataggtgcaaaaaatcctgccagaactgttttagaagtcaaggataactccgttagggtattggatatatcaaaattagactggagttctgattgggaaaggcacatagctaaagatttgtcacaatatgaatacactacagttcttctagaacgtcagcctagaaggtcgccgtacgtcaaatttatctattttattaaaggctttttatatcatacatcggctgccaaagttatttgcgtctcgcctgtcatgtctggtaattcatatagagatcgaaaaaagagatcggtcgaagcatttcttgattggatggacacattcggattgcgagactccgttccggatagacgcaaattagacgatgtagcggatagtttcaatttggctatgagatacgtattagataaatggaatactaattatacaccttataataggtgtaaatctagaaattacataaaaaaaatgtaataacgttagtaacgccattatggataatctatttacctttctacatgaaatagaagatagatatgccagaactatttttaactttcatctaataagttgcgatgaaataggagatatatatggtcttatgaaagaacgcatttcctcagaggatatgtttgataatatagtgtataataaagatatacatcatgccattaagaaactagtgtattgcgacatccaacttactaaacacattattaatcagaatacgtatccggtatttaacgattcttcacaagtgaaatgttgtcattatttcgatataaactcagataatagcaatattagctctcgtacagtagagatatttgagagggaaaagtcatctcttgtatcatatattaaaactaccaataagaagagaaaggtcaattatggggaaataaagaaaactgtacatggaggcactaatgcaaattacttttccggtaaaaagtctgatgagtatctgagcactacagtcaggtccaacattaatcaaccttggatcaaaaccatttctaagagaatgagagtagatatcattaatcactctatagtaacgcgtggaaaaagctctatattacaaactatagaaattatttttactaatagaacatgtgtgaaaatattcaaggattctactatgcacattattctatccaaggacaaggatgaaaaggggtgtatacacatgattgacaaattattctatgtctattataatttatttctgttgttcgaggatatcatccaaaacgagtactttaaagaagtagctaatgttgtaaaccacgtactcacggctacggcattagatgagaaattattcctaattaagaaaatggctgaacacgatgtttatggagttagcaatttcaaaatagggatgtttaacctgacatttattaagtcgttggatcataccgttttcccctctctgttagatgaggatagcaaaataaagttttttaaggggaaaaagctcaatattgtagcattacgatctctggaggattgtataaattacgtgactaaatccgagaatatgatagaaatgatgaaggaaagatcgactattttaaatagcatagatatagaaacggaatcggtagatcgtctaaaagaattgcttctaaaatgaaaaaaaaacactaattcagaaatggatcaacgactcggatataagtttttggtgcctgatcctaaagccggagttttttatagaccgttacatttccaatatgtatcgtattctaattttatattgcatcgattgcatgaaatcttgaccgtcaagcggccactcttatcgtttaagaataatacagaacgaattatgatagaaattagcaatgttaaagtgactcctccagattactcacctataatcgcgagtattaaaggtaagagttatgacgcattagccacgttcactgtaaatatctttaaagaggtaatgaccaaagagggtatatccatcactaaaataagtagttatgagggaaaagattctcatttgataaaaattccgctactaataggatacgggaataaaaatccacttgatacagccaagtatcttgttcctaatgtcataggtggagtctttatcaataaacaatctgtcgaaaaagtaggaattaatctagtagaaaagattacaacatggccaaaatttagggttgttaagccaaactcattcactttctcgttttcctccgtatcccctcctaatgtattaccgacaagatatcgccattacaagatatctctggatatatcacaattggaagcgttgaatatatcatcgacaaagacatttataacggtcaatattgttttgctgtctcaatatttatctagagtgagtctagaattcattagacgtagtttatcatacgatatgcctccagaagttgtctatctagtaaacgcgataatagatagtgctaaacgaattactgaatctattactgactttaatattgatacatacattaatgacctggtggaagctgaacacattaaacaaaaatctcagttaacgatcaacgagttcaaatatgaaatgctgcataactttttacctcatatgaactatacacccgatcaactaaagggattttatatgatatctttactaagaaagtttctctactgtatctaccacacttctagatatccagatagagattcgatggtttgtcatcgcatcctaacgtacggcaaatattttgagacgttggcacatgatgaattagagaattacataggcaacatccgaaacgatatcatgaacaatcacaagaacagaggcacttacgcggtaaacattcatgtactaacaactcctggacttaatcatgcattttctagtctattgagtggaaagttcaaaaagtcagacggtagttatcgaacacatcctcactattcatggatgcagaatatttctattcctaggagtgttggattttatccggatcaagtaaagatttcaaagatgttttctgtcagaaaataccatccaagtcaatatctttacttttgttcatcggacgttccggaaagaggtcctcaggtaggtttagtatctcaattgtctgtcttgagttccattacaaatatactaacgtctgagtatttggatttggaaaagaaaatttgtgagtatatcagatcatattataaagatgatataagttactttgaaacaggatttccaatcactatagaaaatgctctagtcgcatctcttaatccaaatatgatatgtgattttgtaactgactttagacgtagaaaacggatgggattcttcggtaacttggaggtaggtattactttagttagggatcacatgaatgaaattcgcattaatattggagcgggaagattagtcagaccattcttggttgtggataacggagagctcatgatggatgtgtgtccggagttagaaagcagattagacgacatgacattctctgacattcagaaagagtttccgcatgtcatcgaaatggtagatatagaacaatttacttttagtaacgtatgtgaatcggttcaaaaatttagaatgatgtcaaaggatgaaagaaagcaatacgatttatgtgactttcctgccgaatttagagatggatatgtagcatcttcactagtgggaatcaatcacaattctggacccagagctattcttggatgtgctcaagctaaacaagctatctcttgtctgagctcggatatacgaaataaaatagacaatggaattcatttgatgtatccagagaggccaatcgtgattagtaaggctttagaaacttcaaagattgcggctaattgcttcggccaacatgttactatagcattaatgtcgtacaaaggtatcaatcaagaggatggaattatcatcaaaaaacaatttattcagagaggcggtctcgatattgttacagccaagaaacatcaagtagaaattccgttggaaaactttaataacaaagaaagagataggtctaacgcctattcaaaattagaaagtaatggattagttagactgaatgctttcttggaatccggagacgctatagcacgaaatatctcatcaagaactcttgaagatgattttgctagagataatcagattagctttgatgtttccgaaaaatataccgatatgtacaaatctcgcgttgaacgagtacaagtagaacttactgacaaagttaaggtacgagtattaaccatgaaagaaagaagacccattctaggagacaaatttaccactagaacgagtcaaaagggaacagtcgcgtatatcgcggatgaaacggaacttccatacgatgaaaatggtatcacaccagatgtcattattaattctacatccatcttctctagaaaaactatatctatgttgatagaggttattttaacagccgcatattctgctaagccgtacaacaataagggagaaaaccgacctgtctgttttcctagtagtaacgaaacatccatcgatacatatatgcaattcgctaaacaatgttatgagcattcaaatccgaaattgtctgatgaagaattatcggataaaatcttttgtgaaaagattctctatgatcctgaaacggataagccttatgcatccaaagtattttttggaccaatttattacttgcgtctgaggcatttaactcaggacaaggcaaccgttagatgtagaggtaaaaagacgaagctcattagacaggcgaatgagggacgaaaacgtggaggaggtatcaagttcggagaaatggagagagactgtttaatagcgcatggtgcagccaatactattacagaagttttgaaagattcggaagaagattatcaagatgtgtatgtttgtgaaaattgtggagacatagcagcacaaatcaagggtattaatacatgtcttagatgttcaaaacttaatctctctcctctcttaacaaaaattgataccacgcacgtatctaaagtatttcttactcaaatgaacgccagaggcgtaaaagttaaattagatttcgaacgaaggcctccttcgttttataaaccattagataaagttgatctcaaaccgtcttttctggtgtaatattctagtttggtagtagatacatatcaatatcatcaaattcgagatccgaattataaaatgggcgtggattgttaactatagaatcggacgtctgatattcgaaaatctgtggagttttaggttttggtggaggtgtaactgctacttgggatactgaagtctgatattcagaaagctgggggatgttctggttcgacatccaccgatggtgtcacatcactaatcggttcggtaacgtctgtggacgatggaggcaccacttctacaggttctggttctttatcctcagtcatcaacggagctacttcaatgcgaggaaatgtataatttggtaatggtttctcatgtggatctgaagaagaggtaagatatctactagaaagataccgatcacgttctagttctcttttgtagaacttaactttttctttctccgcatctagttgatattccaacctcttcacgttcgcatgggttacctccgcagtttttacgagcgatttcacgttcagccttcatgcgtcttatagcatgaattcgcttatcgttatcgggtttagcttctgtcaccttagcaattccttttttattaaactctacataatcatatccatttctattgtttgttctaatataaacgagtatagcatcattgctaaatttttcaatagtatcgaaaacagaatatcctaaaccatataatatatattcaggaacactcaaactaaatgtccaggattctcctaaatacgtaaactttaatagtgcgaaatcattcaaaaatctaccacttatagatagatagatagtacataaatgcgtatagtagtctacctatctctttattatgaaaaccggcattacgatcatatatgtcgtgatatacctgtgatccgtttacgttaaaccataaatacatgggtgatcctataaacatgaatttatttctaattctcagagctatagttaattgaccgtgtaatatttgcttacatgcatacttgatacgatcattaataagatttttatcattgctcgttatttcagaatcgtatatataaggagtaccatcgtgattcttaccagatattatacaaaatactatatataaaatatattgacccacgttagtaatcatgtaaatgtttaacgttttaaattttgtattcaatgatccattatcatacgctagcatggtcttatgatattcattctttaaaatataatattgtgttagccattgcattggggctcctaatggagattttttattctcatccattttaggataggctttcataaagtccctaataacttcgtgaataatgtttctatgttttctactgatgcatgtatttgcttcgatttttttatcccatgtttcatctatcatagatttaaacgcagtaatgctcgcaacattaacatcttgaaccgttggtacaattccgttccataaatttataatgttcgccatttatataactcattttttgaatatacttttaattaacaaaagagttaagttactcatatggacgccgtccagtctgaacatcaatctttttagccagagatatcatagccgctcttagagtttcagcgtgattttccaacctaaatagaacttcatcgttgcgtttacaacacttttctatttgttcaaactttgttgttacattagtaatctttttttccaaattagttagccgttgtttgagagtttcctcattgtcgtcttcatcggctttaacaattgcttcgcgtttagcctctggctttttagcagccgttgtagaaaaaaattcagttgctggaattgcaagatcgtcatctccggggaaaagagttccgtccatttaaagtacagattttagaaactgacactctgcgttatttatatttggtacaacacatggattataaatattgatgttaataacatcagaaaatgtaaagtctatacattgttgcatcgtgttaaattttctaatggatctagtattattgggtccaacttctgcctgaaatccaaatatggaagcggatacaaaaccgtttcctggataaaccacacatctccacttttgctttacatcagaaattgtgtcgttgacatcttgaactctcctatctaatgccggtgttccacctatagattttgaatattcgaatgctgcatgagtagcattaaattccttaatattgccataattttcatatattgagtaaccctggataaaaagtaaacacaccgcagccgtagctaccacaataaaaaaaattgatagagagttcatttataatctattagaagctgacaaaatttttttacacgcatcagacaatgctttaataaatagttcaacatctacttttgtcatatcgaaccgatggtatgattctaacctagaattacatccgaaaaagttgactatgttcatagtcattaagtcattaacaaacaacattccagactctggattataagacgatactgtttcgtcacaattacctaccttaatcatgtgattatgaatattggctattagagcaccttctaagaaatctataatatctttgaaacacgatttaaaatcaaaccacgaatatacttctacgaagaaagttagtttacccataggagaaataactataaatggagatctaaatacaaaatccggatctatgatagttttaacattattatattctctattaaatacctccacatctaaaaatgttaattttgaaactatgtcttcgtttattaccgtacctgaactaaacgctataagctctattgtttgagaactctttaaacgatattcttgaaatacatgtaacaaagtttcctttaactcggtcggtttatctaccatagttacagaatttgtatccttatctataatataataatcaaaatcgtataaagttatataattatcgcgttcagattgggatcttttcaaatagactaaaaaccccatttctctagtaagtatcttatgtatatgtttgtaaaatatcttcatggtgggaatatgctctaccgcagttagccattcctcattgacagcggtagatgtattagacaaaactattccaatgtttaacaagggccattttacgagattattaaatccttgtttgataaatgtagccaatgagggttcgagttcaacgacgattgaattctcttcccgcggatgctgcatgatgaacgacgggatgttgttcgattgatttggaattctttttcgactttttgtttatattaaatattttaaaatttatagcggatagcaattcatgtaccacggataatgtagacgcgtattgcgcatcgatatctttattattagataaatttatcaataaatgtgagaagtttgcctcgttaaggtcttccatttaaatattatataaacatttgtgtttgtatcttattcgtcttttatggaatagttttttactagtaaagctgcaattacacactttgtccgtaaaacataaatataaacaccagcttttatcaatcgttccaaaaagtcgacggcggacatttttaacatggcatctattttaaatacacttaggtttttggaaaaaacatcattttataattgtaacgattcaataactaaagaaaagattaagattaaacataagggaatgtcatttgtattttataagccaaagcattctaccgttgttaaatacttgtctggaggaggtatatatcatgatgatttggttgtattggggaaggtaacaattaatgatctaaagatgatgctattttacatggatttatcatatcatggagtgacaagtagtggaacaatttacaaattgggatcgtctatcgatagactttctctaaataggactattgttacaaaagttaataattataattatgatacattttttgacgatgatgattgatcgctattgcacaattttgtttttttactttctaatatagcgtttagattctttttcatgtgcgaatattgatttactaaaatatctatgtttaacttttgttctataacgtccttatcggcggtatcggtacatatacgtaattcaccttcacaaaatacggagtcttcgataataatagccaatcgattattggatctagctgtctgtatcatattcaacatgtttaatatatcctttcgtttcccctttacaggcatcgatcgtagcatattttccgcgtctgagatggaaatgttaaaactacaaaaatgcgtaatgttagcccgtcctaatattggtacgtgtctataagtttggcatagtagaataatagacgtgtttaaatgccttccaaagtttaagaattctattagagtattgcattttgatagtttatcgcctacatcatcaaaaataagtaaaaagtgtgctgattttttatgattttgtgcgacagcaatacatttttctatgttacttttagttcgtatcagattatattctagagattcctgactactaacgaaattaatatgatttggccaaatgtatccatcataatctggattataaacgggtgtaaacaagaatacatgtttatattttttaactagtgtagaaaacagagatagtaaatagatagtttttccagatccagatcctcccgttaaaaccattctaaacggcatttttaataaattttctcttgaaaattgtttttcttggaaacaattcataattatatttacagttactaaattaatttgataataaatcaaaatatggaaaactaaggtcgttagtagggaggagaacaaagaaggcacatcgtgacataaataacatttattatcatgatgacaccagaaaacgacgaagagcagacatctgtgttctccgctactgtttacagagacaaaattcagggaaagaataaacgcaaacgcgtgattggtctatgtattagaatatctatggttatttcactactatctatgattaccatgtccgcgtttctcatagtgcgcctaaatcaatgcatgtctgctaacgaggctgctattactgacgccgctgttgccgttgctgctgcatcatctactcatagaaaggttgcgtctagcactacgcaatatgatcacaaagaaagctgtaatggtttatattaccagggttcttgttatatattacattcagactaccagttattctcggatgctaaagcaaattgcactgcggaatcatcaacactacccaataaatccgatgtcttgactacctggctcattgattatgttaaggatacatggggatctgatggtaatccaattacaaaaactacatccgattatcaagattctgatgtatcacaagaagttagaaagtatttttgtgttaaaacaatgaactaatatttatttttgtacattaataaatgaaatcgcttaatagacaaactgtaagtaggtttaagaagttgtcggtgccggtcgctataatgatgatactctcaaccattattagtggcataggaacatttctgcattacaaagaagaactgatgcctagtgcttgcgccaatggatggatacaatacgataaacattgttatttagatactaacattaaaatgtctacagataatgcggtttatcagtgtcgtaaattacgagccagattgcctagaccggatactagacatctgagagtattgtttagtattttttataaagattattgggtaagtttaaaaaagaccaatgataaatggttagatattaataatgataaagatatagatattagtaaattaacaaattttaaacaactaaacagtacgacggatgctgaagcgtgttatatatacaagtctggaaaactggttaaaacagtatgtaaaagtactcaatctgtactatgtgttaaaaaattctacaagtgacaacaaaaaatgaattaataataagtcgttaacgtacgccgccatggacgccgcgtttgttattactccaatgggtgtgttgactataacagatacattgtatgatgatctcgatatctcaatcatggactttataggaccatacattataggtaacataaaaactgtccaaatagatgtacgggatataaaatattccgacatgcaaaaatgctactttagctataagggtaaaatagttcctcaggattctaatgatttggctagattcaacatttatagcatttgtgccgcatacagatcaaaaaataccatcatcatagcatgcgactatgatatcatgttagatatagaagataaacatcagccattttatctattcccatctattgatgtttttaacgctacaatcatagaagcgtataacctgtatacagctggagattatcatctaatcatcaatccttcagataatctgaaaatgaaattgtcgtttaattcttcattctgcatatcagacggcaatggatggatcataattgatgggaaatgcaatagtaattttttatcataaaagttgtaaagtaaataataaaacaataaatattgaactagtagtacgtatattgagcaatcagaaatgatgctggtacctcttatcacggtgaccgtagttgcgggaacaatattagtatgttatatattatatatttgtaggaaaaagatacgtactgtctataatgacaataaaattatcatgacaaaattaaaaaagataaagagttctaattccagcaaatctagtaaatcaactgatagcgaatcagactgggaggatcactgtagtgctatggaacaaaacaatgacgtagataatatttctaggaatgagatattggacgatgatagcttcgctggtagtttaatatgggataacgaatccaatgttatggcgcctagcacagaacacatttacgatagtgttgctggaagcacgctgctaataaataatgatcgtaatgaacagactatttatcagaacactacagtagtacttaatgaagataccaaacagaatcctaactattcatccaatcctttcgtaaattataataaaaccagtatttgtagcaagtcaaatccgttcattacagaactcaacaataaatttagtgagaataatccgtttagacgagcacatagcgatgattatcttaataagcaagaacaagatcatgaacacgatgatatagaatcattggtgtgattagtttcctttttataaaattgaagtaatatttagtattattgctgccgtcacgttgtacaaatggagatattccctgtattcggcatttctaaaattagcaattttattgctaataatgactgtagatattatatagatacagaacatcaaaaaattatatctgatgagatcaatagacagatggatgaaacggtacttcttaccaacatcttaagcgtagaagttgtaaatgacaatgagatgtaccatcttattcctcatagattatcgacgattatactctgtattagttctgtcggaggatgtgttatctctatagataatgacgtcaatggcaaaaatattctaacctttcccattgatcatgctgtaatcatatccccactgagtaaatgtgtcgtagttagcaagggtcctacaaccatattggttgttaaagcggatatacctagcaaacgattggtaacatcgtttacaaacgacatactgtatgtaaacaatctatcactgattaattattcgccgttgtctgtattcattattagacgagttaccgactatttggatagacacatatgcgatcagatatttgcgaataataagtggtattccattataaccatcgacaataagcagtttcctattccatcaaactgtataggtatgtcctctgccaagtacataaattctagcatcgagcaagatactttaatacatgtttgtaacctcgagcatccattcgacttagtatacaaaaaaatgcagtcgtacaattctgtacctatcaaggaacaaatattgtacggtagaattgataatataaatatgagcattagtatttctgtggattaatagatttctagtatggggatcattaatcatctctaatctctaaatacctcataaaacgaaaaaaaagctattatcaaatactgtacggaatggattcattctcttctctttttatgaaactctgttgtatatctactgataaaactggaagcaaaaaatctgataaaaagaataagaataagatcaaggattattataaaataacaatagttcctggttcctcttccacgtctactagctcgtggtattatacacatgcctagtaatagtctctttgcgttgacggaaagcagactagaaataacaggctaaaatgttcagacaccataatagttcccaacccagataataacagagtaccatcaacacattcctttaaactcaatcccaaacccaaaaccgttaaaatgtatccggccaattgatagtagataatgaggtgtacagcgcatgatgatttacacagtaaccaaaatgaaaatactttagtaattataagaaatatagatggtaacgtcatcatcaacaatccaataatatgccggagagtaaacattgacggataaaacaaaaatgctccgcataactctatcatggcaataacacaaccaaatacttgtaagattcctaaattagtagaaaatacaacggatatcgatgtataagtgatctcgagaaataataagaataaagtaatgcccgtaaagataaacatcaacattgtttggtaatcattaaaccaattagtatgaagttgaactaatttcacagtagattttattccagtattatccccgcatgtataagtacctggtaagatatctttatattccataatcaatgagacatcactatctgataacgaatgaagtctagcactagtatgccatttacttaatattgtcgtcttggaagttttattataagttaaaatatcatggttatccaatttccatctaatatactttgtcggattatctatagtacacggaataatgatggtatcattacatgctgtatactctatggtctttgtagttgttataacaaccaacgtatagaggtatatcaacgatattctaactcttgacattttttatttatttaaaatgatacctttgttatttattttattctattttgctaacggtattgaatggcataagtttgaaacgagtgaagaaataatttctacttacttattagacgacgtattatacacgggtgttaatggggcggtatacacattttcaaataataaactaaacaaaactggtttaactaataataattatataacaacatctataaaagtagaggatgcggaaccaataacggaaatcccaaatgttggaaaatagacggttcagacgacccaaaacatagaggtagaggatacgctccttatcaaaatagcaaagtaacgataatcagtcacaacggatgtgtactatctgacataaacatatcaaaagaaggaattaaacgatggagaagatttgacggaccatgtggttatgatttatacacggcggataacgtaattccaaaagatggtttacgaggagcattcgtcgataaagatggtacttatgacaaagtttacattcttttcactgatactatcggctcaaagagaattgtcaaaattccgtatatagcacaaatgtgcctaaacgacgaaggtggtccatcatcattgtctagtcatagatggtcgacgtttctcaaagtcgaattagaatgtgatatcgacggaagaagttatagacaaattattcattctagaactataaaaacagataatgatacgatactatatgtattcttcgatagtccttattccaagtccgcattatgtacctattctatgaataccattaaacaatctttttctacgtcaaaattggaaggatatacaaagcaattgccgtctccagctcctggtatatgtttaccagctggaaaagttgttccacataccacgtttgaagtcatagaaaaatataatgtactagatgatattataaagcctttatctaaccaacctatcttcgaaggaccgtctggtgttaaatggttcgatataaaggagaaggaaaatgaacatcgggaatatagaatatacttcataaaagaaaattctatatattcgttcgatacaaaatctaaacaaactcgtagctcgcaagtcgatgcgcgactattttcagtaatggtaacttcgaaaccgttatttatagcagatatagggataggagtaggaatgccacaaatgaaaaaaatacttaaaatgtaatcttaatcgagtacaccgcacgacaatgaacaaacataagacagattatgctggttatgcttgctgcgtaatatgcggtctaattgttggaattatttttacagcgacactattaaaagttgtagaacgtaaattagttcatacaccatcaatagataaaacgataaaagatgcatatattagagaagattgtcctactgactggataagctataataataaatgtatccatttatctactgatcgaaaaacctgggaggaaggacgtaatgcatgcaaagctctaaatccaaattcggatctaattaagatagagactccaaacgagttaagttttttaagaagcattagacgcggatattgggtaggagaatccgaaatattaaaccagacaaccccatataattttatagctaaaaatgccacgaagaatggaactaaaaaacggaaatatatttgtagtacaacgaatactcccaaactacatttttatcataccactacttcggttagatgttttagaaaaaaataaatatcgccgtaccgttcttgtttttataaaaataacaattaacaattatcaaattttttctttaatattttacgtggttgaccattcttggtggtaaaataatctcttagtgttggaatggaatgctgtttaatgtttccgcactcatcgtatattttgacgtatgcagtcacatcgtttacgcaatagtcagactgtagttctatcatgcttcctacatcagaaggaggaacagttttaaagtctcttggttttaatctattgccattagttttcatgaaatcctttgttttatccacttcacattttaaataaatgtccactatacattcttctgttaattttactagatcgtcatgggtcatagaatttataggttccgtagtccatggatccaaactagcaaacttcgcgtatacggtatcgcgattagtgtatacaccaactgtatgaaaattaagaaaacagtttaataaatcaacagaaatatttaatcctccgtttgatacagatgcgccatatttatggatttcggattcacacgttgtttgtctgaggtgttcgtctagtgttgcttctacgtaaacttcgattcccatatattctttattgtcagaatcgcataccgatttatcatcatacactgtttgaaaactaaatggtatacacatcaaaataataaataataacgagtacattctgcaatattgttatcgtaattggaaaaatagtgttcgagtgagttggattatgtgagtattggattgtatattttattttatattttatattttgtagtaagaatagaatgctaatgtcaagtttattccaatagatgtcttattaaaaaacatatataataaataacaatggctgaatggcataaaattatcgaggatatctcaaaaaataataagttcgaggatgccgccatcgttgattacaagactacaaagaatgttctagctgctattcctaacagaacatttgccaagattaatcctctcatcactaatcgtaatattctaaaacctcttattggtcagaaatattgtattgtatatactaactctctaatggatgagaacacgtatgctatggagttgcttactgggtacgcccctgtatctccgatcgttatagcgagaactcataccgcacttatatttttgatgggtaagccaacaacatccagacgtgacgtgtatagaacgtgtagagatcacgctacccgtgtacgtgcaactggtaattaaaataaaaagtaatattcatatgtagtgtcaattttaaatgatgatgatgaaatggataatatccatattgacgatgtcaataatgccggtattggcatacagttcatcgatttttagatttcattcagaggatgtggaattatgttatgggcatttgtattttgataggatctataatgtagtaaatataaaatataatccgcatattccatatagatataattttattaatcgcacgttaaccgtagatgaactagacgataatgtcttttttacacatggttattttttaaaacacaaatatggttcacttaatcctagtttgattgtctcattatcaggaaacttaaaatataatgatatacaatgctcagtaaatgtatcgtgtctcattaaaaatttggcaacgagtacatctactatattaacatctaaacataagacttattctctacatcggtccacgtgtattactataataggatacgattctattatatggtataaagatataaatgacatctatgattttactgcaatatgtatgctaatagcgtctacattgatagtgaccatatacgtgtttaaaaaaataaaaatgaactcttaattatgctatgctattagaaatggataaaatcaaaattacggttgattcaaaaattggtaatgttgttaccatatcgtataacttggaaaagataactattgatgtcacacctaaaaagaaaaaagaaaaggatgtattattagcgcaatcagttgctgtcgaagaggcaaaagatgtcaaggtagaagaaaaaaatattatcgatattgaagatgacgatgatatggatgtagaaagcgcataatacgatctataaaaataagtatataaatactttttatttactgtactcttactgtgtagtggtgataccctactcgattatttttttaaaaaaaaatacttattctgattcttctagccatttccgtgttcgttcgaatgccacatcgacgttaaagataggggagtagttgaaatctagttctgcattgttggtacgcacctcaaatgtagtgttggatatcttcaacgtatagttgttgagtagtgatggttttctaaatagaattctcttcatatcattcttgcacgcgtacatttttagcatccatcttggaatcctagatccttgttctattcccaatggtttcatcaatagaagattaaacatatcgtacgaacacgatggagagtaatcgtagcaaaagtaagcatttcctttaatctcagatcccggatactggatatattttgcagccaacacgtgcatccatgcagcatttcctacatatacccggctatgtaccgcgttatcatcgactgtacgatacataatgttaccgtgttgcttacattgctcgtaaaagactttcatcaatttgtctccttctccgtaaattccagtgggtcttaggcaacaagtatacaattttgctccattcatgattacggaattattggctttcataaccagttgctcggccatacgtttactttttgcgtatacatgtcctggtgatatatcataaagggtatgctcatggccgatgaatggatcaccgtgtttattgggtcctattgcttccatgctactagtatagatcaaatacttgattcctaggtccacacaagctgccaatatagtctgtgttccataatagtttactttcatgatttcattatcggtgtattttccaaatacatccactagagcagctgtatgaataatcagatttaccccatctagcgcttctcttaccttatcaaagtcgtttatatcacattgtatatagtttataaccttaactttcgaggttattggttgtggatcttctacaatatctatgactctgatttcttgaacatcatctgcactaattaacagttttactatatacctgcctagaaatccggcaccaccagtaaccgcgtacacggccattgctgccactcataatatcagactacttattctattttactaaataatggctgtttgtataatagaccacgataatatcagaggagttatttactttgaaccagtccatggaaaagataaagttattggattaaaatccggaacgtatagtttgataattcatcgttacggagatattagtcaaggatgtgattccataggcagtccagaaatatttatcggtaacatctttgtaaacagatatggtgtagcatatgtttatttagatacagatgtaaatatatctacaattattggaaaggcgttatctatttcaaaaaatgatcagagattagcgtgtggagttattggtatttcttacataaatgaaaagataatacattttcttacaattaacgagaatggcgtttgatatatcagttaatgcgtctaaaacaataaatgcattagtttacttttctactcagcaaaataaattagtcatacgtaatgaagttaatgatacacactacactgtcgaatttgatagggacaaagtagttgacacgtttatttcatataatagacataatgactccatagagataagaggggtgcttccagaggaaactaatattggttgcgcggttaatacgccggttagtatgacttacttgtataataagtatagttttaaactgattttagcagaatatataagacacagaaatactatatccggcaatatttattcggcattgatgacactagatgatttggctattaaacagtatggagacattgatctattatttaatgagaaacttaaagtagactccgattcgggactatttgactttgtcaactttgtaaaggatatgatatgttgtgattctagaatagtagtagctctatctagtctagtatctaaacattgggaattgacaaataaaaaatataggtgtatggcattagccgaacatatatctgatagtattccaatatctgagctatctagactacgatacaatctatgtaagtatctacgcgggcacactgagagcatagaggatgaatttgattattttgaagacgatgattcgtctacatgttctgccgtaaccgacagggaaacggatgtataattttttttatagcgtgaaggatatgataaaaaatataattgttgtatttatcccattccaatcaccttatatgattctgtaacacaatgaaggagtcttatagatgtatagaggtcagatactggtttgataaactgtttattccacataagtatgtttgactttatggttagacccgcatactttaacaaatcactgaaaattggagttaggtattgacctctcagaatcagttgccgttctggaacattaaatgtattttttatgatatactccaacgcatttatgtgggcatacaacaagtcattactaatggagtattccaagagaagagatttcaacagactgtttatgaactcgaatgccgcctcattgtcgcttatattgatgatgtcgaattctcccaatatcatcaccgatgagtagctcatcttgttatcgggatccaagttttctaaagatgtcattaaaccctcgatcatgaatggatttatcatcatcgtttttatgttggacatgagcttagtccgtttgtccacatctatagacgacgatttctgaattatttcatatatccctctctttaactccaggaacttgtcaggatggtctactttaatatgttctcgtctaagagatgaaaatctttggatggttgcacgcgacttttctctaaaggatcctctcttaaatgaatccatcttatccttggacaagatggacagtctattttccttagatggtttaatatttttgttacccatgatctataaaggtagacctaatcgtctcggatgaccatatatttattttcagttttattatacgcataaattgtaaaaaatatgttaggtttacaaaaatgtctcgtggggcattaatcgtttttgaaggattggacaaatctggaaaaacaacacaatgtatgaacatcatggaatctataccggcaaacacgataaaatatcttaactttcctcagagatccactgtcactggaaagatgatagatgactatctaactcgtaaaaaaacctataatgatcatatagttaatctattattttgtgcaaatagatgggagtttgcatcttttatacaagaacaactagaacagggaattactttaatagttgatagatacgcattctctggagtagcgtatgccgccgctaaaggcgcgtcaatgactctcagtaagagttatgaatctggattgcctaaacccgacttagttatattcttggaatctggtagcaaagaaattaatagaaacgtcggcgaggaaatttatgaagatgttacattccaacaaaaggtattacaagaatataaaaaaatgattgaagaaggagatattcattggcaaattatttcttctgaattcgaggaagatgtaaagaaggagttgattaagaatatagttatagaggctatacacacggttactggaccagtggggcaactgtggatgtaatagtgaaattacattttttataaatggatgaagcatattactctggcaacttggaatcagtactcggatacgtgtccgatatgcataccgaactcgcatcaatatctcaattagttattgccaagatagaaactatagataatgatatattaaacaaggacattgtaaattttatcatgtgtagatcaaacttggataatccatttatctctttcctagatactgtatatactattatagatcaagagatctatcagaccgaattgattaattcattagacgacaatgaaattatcgattgtatagttaacaagtttatgagcttttataaggataacctagaaaatatagtagatgctatcattactctaaaatatataatgaataatccagattttaaaactacgtatgccgaagtactcggttccagaatagcggatatagatattaaacaagtgatacgtgagaatatactacaattgtctaataatatccgcgaacgatatttgtgaaaatattaaaaaaaaatactttttttattaaatgacgtcgcttcgcgaatttagaaaattatgctgtgatatatatcacgcatcaggatataaagaaaaatctaaattaattagagactttataacagatagggatgataaatatttgatcattaagctattgcttcccggattagacgatagaatttataacatgaacgataaacaaattataaaattatatagtataatatttaaacaatctcaggaagatatgctacaagatttaggatacggatatataggagacactattaggactttcttcaaagagaacacagaaatccgtccacgagataaaagcattttaactttagaagaagtggatagttttttaactacgttatcatccgtaactaaagaatcgcatcaaataaaattattgactgatatcgcatccgtttgtacatgtaatgatttaaaatgtgtagtcatgcttattgataaagatctaaaaattaaagcgggccctcggtacgtacttaacgctattagtcctcatgcctatgatgtgtttagaaaatctaataacttgaaagagataatagaaaatgcatctaaacaaaatctagactctatatctatttctgttatgactccaattaatcccatgttagcggaatcgtgtgattctgtcaataaggcgtttaaaaaatttccatcaggaatgtttgcggaagtcaaatacgatggtgaaagagtacaagttcataaaaataataacgagtttgccttctttagtagaaacatgaaaccagtactctctcataaagtggattatctcaaagaatacataccgaaagcatttaaaaaagctacgtctatcgtattggattctgaaattgttcttgtagacgaacataatgtaccgctcccgtttggaagtttaggtatacacaaaaagaaagaatataaaaactctaacatgtgtttgttcgtgtttgactgtttgtactttgatggattcgatatgacggacattccattgtacgaacgaagatcttttctcaaagatgttatggttgaaatacccaatagaatagtattctcagagttgacgaatattagtaacgagtctcagttaactgacgtattggatgatgcactaacgagaaaattagaaggattggtcttaaaagatattaatggagtatacgaaccgggaaagagaagatggttaaaaataaagcgagactatttgaacgagggttccatggcagattctgccgatttagtagtactaggtgcttactatggtaaaggagcaaagggtggtatcatggcagtctttctaatgggttgttacgacgatgaatccggtaaatggaagacggttaccaagtgttcaggacacgatgataatacgttaagggagttgcaagaccaattaaagatgattaaaattaacaaggatcccaaaaaaattccagagtggttagtagttaataaaatctatattcccgattttgtagtagaggatccaaaacaatctcagatatgggaaatttcaggagcagagtttacatcttccaagtcccataccgcaaatggaatatccattagatttcctagatttactaggataagagaggataaaacgtggaaagaatctactcatctaaacgatttagtaaacttgactaaatcttaatagttacatacaaattaaaataacactatttagttggtggtcgccatggatggtgttattgtatactgtctaaacgcgttagtaaaacatggcgaggaaataaatcatataaaaaatgatttcatgattaaaccatgttgtgaaaaagtcaagaacgttcacattggcggacaatctaaaaacaatacagtgattgcagatttgccatatatggataatgcggtatccgatgtatgcaattcactgtataaaaagaatgtatcaagaatatccagatttgctaatttgataaagatagatgacgatgacaagactcctactggtgtatataattattttaaacctaaagatgccattcctgttattatatccataggaaaggatagagatgtttgtgaactattaatctcatctgataaagcgtgtgcgtgtatagagttaaattcatataaagtagccattcttcccatggatgtttccttttttaccaaaggaaatgcatcattgattattctcctgtttgatttctctatcgatgcggcacctctcttaagaagtgtaaccgataataatgttattatatctagacaccagcgtctacatgacgagcttccgagttccaattggttcaagttttacataagtataaagtccgactattgttctatattatatatggttgttgatggatctgtgatgcatgcaatagctgataatagaacttacgcaaatattagcaaaaatatattagacaatactacaattaacgatgagtgtagatgctgttattttgaaccacagattaggattcttgatagagatgagatgctcaatggatcatcgtgtgatatgaacagacattgtattatgatgaatttacctgatgtaggcgaatttggatctagtatgttggggaaatatgaacctgacatgattaagattgctctttcggtggctggtatttggaaagttttataggtagttgatagaacaaaatacataattttgtaaaaataaatcactttttatactaatatgacacgattaccaatacttttgttactaatatcattagtatacgctacaccttttcctcagacatctaaaaaaataggtgatgatgcaactttatcatgtaatcgaaataatacaaatgactacgttgttatgagtgcttggtataaggagcccaattccattattcttttagctgctaaaagcgacgtcttgtattttgataattataccaaggataaaatatcttacgactctccatacgatgatctagttacaactatcacaattaaatcattgactgctagagatgccggtacttatgtatgtgcattctttatgacatcgcctacaaatgacactgataaagtagattatgaagaatactccacagagttgattgtaaatacagatagtgaatcgactatagacataatactatctggatctacacattcaccggaaactagttctgagaaacctgattatatagataattctaattgctcgtcggtattcgaaatcgcgactccggaaccaattactgataatgtagaagatcatacagacaccgtcacatacactagtgatagcattaatacagtaagtgcatcatctggagaatccacaacagacgagactccggaaccaattactgataaagaagaagatcatacagttacagacactgtctcatacactacagtaagtacatcatctggaattgtcactactaaatcaaccaccgatgatgcggatctttatgatacgtacaatgataatgatacagtaccatcaactactgtaggcggtagtacaacctctattagcaattataaaaccaaggactttgtagaaatatttggtattaccgcattaattatattgtcggccgtggcaatattctgtattacatattatatatataataaacgttcacgtaaatacaaaacagagaacaaagtctagatttttgacttacataaatgtctgggatagtaaaatctatcatattgagcgggccatctggtttaggaaagacagccatagccaaaagactatgggaatatatttggatttgtggtgtcccataccactagatttcctcgtcctatggaacgagaaggtgtcgattaccattacgttaacagagaggccatctggaagggaatagccgccggaacatactgagtttttaggaaatatttacggaacttctaaaactgctgtgaatacagcggctattaataatcgtatttgtgtgatggatctaaacatcgacggtgttagaagttttaaaaatacttacctaatgccttactcggtgtatataagacctacctctcttaaaatggttgagaccaagcttcgttgtagaaacactgaagcggatgatgagattcatcgtcgtgtgatgttggcaaaaactgacatggatgaggcaggtgaagccggtctattcgacactattatcattgaagatgatgtgaatttagcatatagtaagttaattcagatactacaggaccgtattagaatgtattttaacactaattagagacttaagacttaaaacttgataattaataatataactcgtttttatatgtggctatttcaacgtctaatgtattagttaaatattaaaacttaccacgtaaaacttaaaatttaaaatgatatttcattgacagatagatcacacattatgaactttcaaggacttgtgttaactgacaattgcaaaaatcaatgggtcgttggaccattaataggaaaaggtggatttggtagtatttatactactaatgacaataattatgtagtaaaaatagagcccaaagctaacggatcattatttaccgaacaggcattttatactagagtacttaaaccatccgttatcgaagaatggaaaaaatctcacaatataaagcacgtaggtcttatcacgtgcaaggcatttggtctatacaaatccattaatgtggaatatcgattcttggtaattaatagattaggtgcagatctagatgcggtgatcagagccaataataatagattaccaaaaaggtcggtgatgttgatcggaatcgaaatcttaaataccatacaatttatgcacgagcaaggatattctcacggagatattaaagcgagtaatatagtcttggatcaaatagataagaataaattatatctagtggattacggattggtttctaaattcatgtctaatggcgaacatgttccatttataagaaatccaaataaaatggataacggtactctagaatttacacctatagattcgcataaaggatacgttgtatctagacgtggagatctagaaacacttggatattgtatgattagatggttgggaggtatcttgccatggactaagatatctgaaacaaagaattgtgcattagtaagtgccacaaaacagaaatatgttaacaatactgcgactttgttaatgaccagtttgcaatatgcacctagagaattgctgcaatatattaccatggtaaactctttgacatattttgaggaacccaattacgacaagtttcggcacatattaatgcagggtgtatattattaagtgtggtgtttggttgatgtaaaatttttgtcgataaaaattaaaaaataacttaatttattattgatctcgtgtgtacaaccgaaatcatggcgatgttttacgcacacgctctcggtgggtacgacgagaatcttcatgcctttcctggaatatcatcgactgttgccaatgatgtcagtttataataacaagtatgacattgtaaaagacaaatatatgtggtgttacagtcaggtgaacaagagatatattggagcactgctgcctatgtttgagtgcaatgaatatctacaaattggagatccgatccatgatcaagaaggaaatcacatatcgccacaaaaactactatgctctaagcggaatcgggtacgagagtctagacttgtgtttggaaggagtagggattcatcatcacgtacttgaaacagaaaacgctgtatatggaaaagttcaacatgattattctactatcaaagagaaggccaaagaaatgaatgcactcagttcaggacctatcatcgattaccacgtctggataggagattgtatctgtcaagttactgctgtggacgtacatggaaaggaaattatgagaatgagattcaaaaagggtgcggtgcttccgatcccaaatctggtaaaagttaaacttggggagaatgatacagaaaatctttcttctactatatcggcggcaccatcgaggtaaccacctctctggaagacagtgtgaatcatgtactcatgaaacgtttggaatctatacgccatatgtggtctgttgtatatgatcattttgatattgtgaatggtaaagaatgctgttatgtgcatacgcatttgtctaatcaaaatcttataccgagtactgtaaaaacaaatttgtacatgaagactatgggatcatgcattcaaatgagtatcttagcgaactgaaggaatcaggtggatggagtcccagaccagaaatgcaggaatttgaatatccagatggagtggaagacactgaatcaattgagagattggtagaggagttcttcaatagatcagaacttcaggctggtaaatctattaatgttaaacatacatctgtttcagctaagcaactaagaacacgtatactctcatcttttgccaacacagagggtggatatttgttcattggagttgataataatacacacaaagtatttggattcacggtgggttacgactacctcagactgatagagaatgatatagaaaagcatatcaaaagactttgtgttgtgtatttctgtgagaagaaagaggacatcaagtacacgtgtcgattcatcaaggtatataaacctggggatgaggctacctcgacatacgtgtgcgctatcaaagtggaaagatgctgttgtgctgtgtttgcagattggccagaatcatggtatcaagaagtattctccagatgaataggtgtcacatataaaattttaattaatgtaactatagagaacaaataataggttgtaatatcatatagacaataactaacaattaattagtaactgttatctctttttaactaactaactatacctattaatacatcgtaattatagttcttaacatctattaatcattgattcgcttctttaattttttataaaccaacattgttaattgaaaagggataacatgttacagaatataaattatatatggattttttttaaaaaggaaatacttgactggagtgtatatttatctcttcattatatagcacgcgtgttttccaatttttccacatcccatataatacaggattataatctcgttcgaacatacgagaaagtggataaaacaatagttgattttttatctaggttgccaaatttattccatattttagaatatggggaaaatattctacatatttattctatggatgatgctaatacgaatattataattttttttctagatagagtattaaatattaataagaacgggtcatttatacacaatctcaggttatcatcatccattaatataaaagaatatgtatatcaattagttaataatgatcatccagataataggataagactaatgcttgaaaatggacgtagaacaagacattttttgtcctatatatcagatacagttaatatctatatatgtattttatatagatgccgaagacagttacggttgtacattattacatagatgtatatatcactataagaaatcagaatcagaatcagaatcatacaatgaattaattaagatattgttaaataatggatcagatgtagataaaaaagatacgtacggaaacacaccttttatcctattatgtaaacacgatatcaacaacgtggaattgtttgagatatgtttagagaatgctaatatagactctgtagactttaatagatatacacctcttcattatgtctcatgtcgtaataaatatgattttgtaaagttattaatttctaaaggagcaaatgttaatgcgcgtaataaattcggaactactccattttattgtggaattatacacggtatctcgcttataaaactatatttggaatcagacacagagttagaaatagataatgaacatatagttcgtcatttaataatttttgatgctgttgaatctttagattatctattatccagaggagttattgatattaactatcgtactatttacgacgctgtcagttataatgcgtataatacgttggtctatctattaaacagaaatggtgattttgagacgattactactagtggatgtacatgtatttcggaagcagtcgcaaacaacaacaaaataataatggaagtactattgtctaaacgaccatctttgaaaattatgatacagtctatgatagcaattactaaacataaacagcataatgcagatttattgaaaatgtgtataaaatatactgcgtgtatgaccgattatgatactcttatagatgtacaatcactacagcaatataaatggtatattttaagatgtttcgatgaaatagatatcatgaagagatgttatataaaaaataaaactgtattccaattagttttttgtatcaaagacattaatactttaatgagatacggtaaacatccttctttcgtgaagtgcactagtctcgacgtatacggaagtcgtgtacgtaatatcatagcatctattagatatcgtcagagattaattagtctattatccaagaagctggatcctggagataaatggtcgtgttttcctaacgaaataaaatataacgataacgaactgtccacatatctaaaaatcttataaacactattaaaatataaaatcacactacatcattgtttccttttagtgctcgacagtgtatactatttttaacgctcataaataaaaatgaaaacgatttccgttgttacgttgttatgcgtactacctgctgttgtttattcaacatgtactgtacccactatgaataacgctaaattaacgtctaccgaaacatcgtttaataataaccagaaagttacgtttacatgtgatcagggatatcattcttcggatccaaatgctgtctgcgaaacagataaatggaaatacgaaaatccatgcaaaaaaatgtgcacagtttctgattacatctctgaactatataataaaccgctatacgaagtgaattccaccatgacactaagttgcaacggcgaaacaaaatattttcgttgcgaagaaaaaaatggaaatacttcttggaatgatactgttacgtgtcctaatgcggaatgtcaacctcttcaattagaacacggatcgtgtcaaccagttaaagaaaaatactcatttggggaatatataactatcaactgtgatgttggatatgaggttattggtgcttcgtacataagttgtacagctaattcttggaatgttattccatcatgtcaacaaaaatgtgatataccgtctctatctaatggattaatttccggatctacattttctatcggtggcgttatacatcttagttgtaaaagtggttttatactaacgggatctccatcatccacatgtatcgacggtaaatggaatcccatactcccaacatgtgtacgatctaacgaaaaatttgatccagtggatgatggtcccgacgatgagacagatttgagcaaactctcgaaagacgttgtacaatatgaacaagaaatagaatcgttagaagcaacttatcatataatcatagtggcgttaacaattatgggcgtcatatttttaatctccgttatagtattagtttgttcctgtgacaaaaataatgaccaatataagttccataaattgctaccgtgaatataaatccgttaaaataatgaataattaataattaataatttaataacaaacaagtatcaaaagattaaagacttatagctagaatcaattgagatgtcttcttcagtggatgttgatatctacgatgccgttagagcatttttactcaggcactattataacaagagatttattgtgtatggaagaagtaacgccatattacataatatatacaggctatttacaagatgcgccgttataccgttcgatgatatagtacgtactatgccaaatgaatcacgtgttaaacaatgggtgatggatacacttaatggtataatgatgaatgaacgcgatgtttctgtaagcgttggcaccggaatactattcatggaaatgtttttcgattacaataaaaatagtatcaacaatcaactaatgtatgatataattaatagcgtatctataattctagctaatgagagatatagaagcgcttttaacgacgatggtatatacatccgtagaaatatgattaacaagttgtacggatacgcatctctaactactattggcacgatcgctggaggtgtttgttattatctgttgatgcatctagttagtttgtataaataattatttcaatatactagttaaaattttaagattttaaatgtataaaaaactaataacgtttttatttgtaataggtgcattagcatcctattcgaataatgagtacactccgtttaataaactgagtgtaaaactctatatagatggagtagataatatagaaaattcatatactgatgataataatgaattggtgttaaattttaaagagtacacaatttctattattacagagtcatgcgacgtcggatttgattccatagatatagatgttataaacgactataaaattattgatatgtctactattcaacgcagaggtcacacgtgtagaatatctaccaaattatcatgccattatgataagtacccttatattcacaaatatgatggtgatgagcgacaatattctattactgcagagggaaaatgctataaaggaataaaatatgaaataagtatgatcaacgatgatactctattgagaaaacatactcttaaaattggatctacttatatatttgatcgtcatggacatagtaatacatattattcaaaatatgatttttaaaaatttaaaatatattatcacttcagtgacagtagtcaaataacaaacaacaccatgagatatattataattctcgcagttttgttcattaatagtatacacgctaaaataactagttataagtttgaatccgtcaattttgattccaaaattgaatggactggggatggtctatacaatatatcccttaaaaattatggcatcaagacgtggcaaacaatgtatacaaatgtaccagaaggaacatacgacatatccgcatttccaaagaatgatttcgtatctttctgggttaaatttgaacaaggcgattataaagtggaagagtattgtacgggaccaccgactgtaacattaactgaatacgacgaccatccgtatgctactagaggtagcaaaaagattcctatttacaaacgcggtgacatgtgtgatatctacttgttgtatacggctaacttcacattcggagattctaaagaaccagtaccatatgatatcgatgactacgattgcacgtctacaggttgcagcatagactttgtcacaacagaaaaagtgtgcgtgacagcacagggagccacagaagggtttctcgaaaaaattactccatggagttcgaaagtatgtctgacacctaaaaagagtgtatatacatgcgcaattagatccaaagaagatgttcccaatttcaaggacaaaatggccagagttatcaagagaaaatttaactaaatttctcggtagcacatcaaatgatgttaccacttttcttagcatgcttaacttgactaaatattcataactaatttttattaatgatacaaaaacgaaataaaactgcatattatacactggttaacgcccttataggctctaaccattttcaagatgaggtccctgattatagtccttctgttcccctctatcatctactccatgtctattagacgatgtgagaagactgaagaggaaacatggggattgaaaatagggttgtgtataattgccaaagatttctatcccgaaagaactgattgcagtgttcatctcccaactgcaagtgaaggcaatggattcagggatatacgaaacaccgataaattataaaaaaagcaatgtgtccgctgtttccgttaataatactattttcgtaactggcggattattcataaataactctaatagcacgatcgtggttaacaatatggaaaaacttgacatttataaagacaaacaatggtcgattatagaaatgcctatggctagggtatatcacggcatcgactcgacatttggaatgttatattttgccggaggtctatccgttaccgaacaatatggtaatttagagaaaaacaacgagatatcttgttacaatcctagaacgaataagtggtttgatatttcatatactatttataagatatccatatcatcattgtgtaaactaaataacgtcttctatgtatttagtaaggacattggatatgtggaaaagtatgatggtctccccgctataaaggcattatcaacttctccttattgattgaaaatgaaaatataaatagtttttatgtatagcagtattaccctatagttttattgcttactactaacatggatacagatacagatgttacaaatgtagaagatatcatgaatgaaatagatagagagaaagaagaaatactaaaaaatgtagaaattgaaaataataaaaacattaacaagaatcatcccaatgaatatattagagaagcactcgttattaatacaagtagtaatagtgattccattgataaagaagttatagaatgtatcagtcacgatgtaggaatatagatcatatctactaatttttataatcaatacaaaacataaaaaacaactcgttattacatagcaggcatggaatccttcaagtattgttttgataacgatggcaagaaatggattatcggaaatactttatattctggtaattcaatactctataaggtcagaaaaaatttcactagttcgttctacaattacgtaatgaagatagatcacaaatcacacaagccattgttgtctgaaatacgattctatatatctgtattggatcctttgactatcgacaactggacacgggaacgtggtataaagtatttggctattccagatctgtatggaattggagaaaccgatgattatatgttcttcgttataaagaatttgggaagagtattcgccccaaaggatactgaatcagtcttcgaagcatgcgtcactatgataaacacgttagagtttatacactctcgaggatttacccatggaaaaatagaaccgaggaatatactgattagaaataaacgtctttcactaattgactattctagaactaacaaactatacaagagtggaaactcacatatagattacaacgaggacatgataacttcaggaaatatcaattatatgtgtgtagacaatcatcttggagcaacagtttcaaaacgaggagatttagaaatgttgggatattgcatgatagaatggttcggtggcaaacttccatggaaaaacgaaagtagtataaaagtaataaaacaaaaaaaagaatataaaaaatttatagctactttctttgaggactgttttcctgaaggaaatgaacctctggaattagttagatatatagaattagtatacacgttagattattctcaaactcctaattatgacagactacgtagactgtttatacaagattgaaatattctttttttatagagtgtggtagtgttacggatatctaatattaatattagactatctctatcgcgctacacgaccaatatcgattactatggatatcttctatgaaaggagagaatgtattcatttctccagcgtcaatctcgtcagtattgacaatactgtattatggagctaatggatccactgctgaacagctatcaaaatatgtagaaaaggaggagaacacggataaggttagcgctcagaatatctcattcaaatccatgaataaagtatatgggcgatattctgccgtgtttaaagattcctttttgagaaaaattggcgataagtttcaaactgttgacttcactgattgtcgcactatagatgcaatcaacaagtgtgtagatatctttactgaggggaaaatcaatccactattggatgaacaattgtctcctagcaattagtgccgtatactttaaagcaaaatggttgacgccattcgaaaaggaatttaccagtgattatcccttttacgtatcaccaacggaaatggtagacgtaagtatgatgtctatgtacggcgagctatttaatcacgcatctgtaaaagaatcattcggtaacttttcaatcatagaactgccatatgttggagatactagtatgatggtcattcttccagacaagattgatggattagaatccatagaacaaaatctaacagatacaaattttaagaaatggtgtaactctctggaagctacgtttatcgatgttcacattcccaagtttaaggtaacaggctcgtataatctggtggatactctagtaaagtcaggactgacagaggtgttcggttcaactggagattatagcaatatgtgtaatttagatgtgagtgtcgacgctatgatccacaaaacgtatatagatgtcaatgaagagtatacagaagcagctgcagcaacttgtgcactggtgtcagactgtgcatcaacaattacaaatgagttctgtgtagatcatccgttcatctatgtgattaggcatgttgatggaaaaatttttttcgttggtagatattgctctccgacaactaattgttaaccattttttttaaaaaaatagaaaaaacatgtggtattagtgcaggtcgttattcttccaattgcaattggtaagatgacggccaactttagtacccacgtcttttcaccacagcactgtggatgtgacagactgaccagtattgatgacgtcaaacaatgtttgactgaatatatttattggtcgtcctatgcataccgcaacaggcaatgcgctggacaattgtattccacactcctctcttttagagatgatgcggaattagtgttcatcgacattcgcgagctggtaaaaaatatgccgtgggatgatgtcaaagattgtgtagaaatcatccgttgttatataccggatgagcaaaaaaccatcatcggactttgtgcatatgctgctacttactggggaggtgaagaccatcccactagtaacagtctgaacgcattgtttgtgatgcttgagatgctaaattacgtggattataacatcatattccggcgtatgaattgatgagttgtacatcttgacattttcttctttcttctcttctccctttcccagaaacaaactttttttacccactataaaataaaatgagtatactacctgttatatttctttctatatttttttattcttcattcgttcagacttttaacgcgcctgaatgtatcgacaaagggcaatattttgcatcattcatggagttagaaaacgagccagtaatcttaccatgtcctcaaataaatacgctatcatccggatataatatattagatattttatgggaaaaacgaggagcggataatgatagaattataccgatagataatggtagcaatatgctaattctgaacccgacacaatcagactctggtatttatatatgcattaccacgaacgaaacctactgtgacatgatgtcgttaaatttgacaatcgtgtctgtctcagaatcaaatatagatcttatctcgtatccacaaatagtaaatgagagatctactggcgaaatggtatgtcccaatattaatgcatttattgctagtaacgtaaacgcagatattatatggagcgggcatcgacgccttagaaataagagacttaaacaacggacacctggaattattaccatagaagatgttagaaaaaatgatgctggttattatacatgtgttttagaatatatatacggtggcaaaacatataacgtaaccagaattgtaaaattagaggtacgggataaaataataccttctactatgcaattaccagaaggtgttgtaacttcaataggtagtaatttgactattgcgtgtagagtatcgttgagacctcccacaacggatgcagacgtcttttggataagtaatggtatgtattacgaagaagatgatggggacggagacggtagaataagtgtagcaaataaaatctatatgaccgataagagacgtgttattacatcccggttaaacattaatcctgtcaaggaagaagatgctacaacgtttacgtgtatggcgtttactattcctagcatcagcaaaacagttactgttagtataacgtgaatgtatgttgttacatttccatgtcaattgagtttataagaatttttatacattatcttccaacaaacaattgacgaacgtattgctatgattaactcccacgatactatgcatattattaatcattaacttgcagactatacctagtgctattttgacatactcatgttcttgtgtaattgcggtatctatattattaaagtacgtaaatctagctatagttttattatttaattttagataatataccgtctccttatttttaaaaattgccacatcctttattaaatcatgaatgggaatttctatgtcatcgttaatatattgtgaacaacaagagcagatatctataggaaagggtggaatgcgatacattgatctatgtagttttaaaacacacgcgaactttgaagaatttatataaatcattccatcgatacatccttctatgttgacatgtatatatccaggaattcttttattaatgtcaggaaatgtataaactaaaacattgcccgaaagcggtgcctctatctgcgttatatccgttcttaacttacaaaatgtaaccaatacctttgcatgacttgttttgttcggcaacgttagtttaaacttgacgaatggattaattacaatagcatgatccgcgcatctattaagtttttttactttaacgcccttgtatgtttttacagagactttatctaaatttctagtgcttgtatgtgttataaatataacgggatatagaactgaatcacctaccttagatacccaattacattttatcagatccagataataaacaaattttgtcgccctaactaattctatattgttatatattttacaattggttatgatatcatgtaataacttggagtctaacgcgcatcgtcgtacgtttatacaattgtgatttagtgtagtatatctacacatgtatttttccgcactatagtattctggactagtgataaaactatcgttatatctgtcttcaatgaactcatcgagatattgctctctgtcatattcatacacctgcataaactttctagacatcttacaatccgtgttattttaggatcatatttacatatttacgggtatatcaaagatgttagattagttaatgggaatcgtctataataatgaatattaaacaattatatgaggacttttaccacaaagcatcataaaaatgagtcgtcgtctgatttatgttttaaatatcaaccgcgaatcaactcataaaatacaagagaatgaaatatatacatattttagtcattgcaatatagaccatacttctacagaacttgattttgtagttaaaaactatgatctaaacagacgacaacctgtaactgggtatactgcactacactgctatttgtataataattactttacaaacgatgtactgaagatattattaaatcatggagtggatgtaacgatgaaaaccagtagcggacgtatgcctgtttatatattgcttactagatgttgtaatatttcacatgatgtagtgatagatatgatagacaaagataaaaaccacttatcgcatagagactattccaacctactactagagtatataaaatctcgttacatgttattgaaggaagaggatatcgatgagaacatagtatccactttattagataagggaatcgatcctaactttaaacaagacggatatacagcgttacattattattatttgtgtctcgcacacgtttataaaccaggtgagtgtagaaaaccgataacgataaaaaaggccaagcgaattatttctttgtttatacaacatggagctaatctaaacgcgttagataattgtggtaatacaccattccatttgtatcttagtattgaaatgtgtaataatattcatatgactaaaatgctgttgacttttaatccgaatttcaaaatatgtaataatcatggattaacgcctatactatgttatataacttccgactacatacaacacgatattcttgttatgttaatacatcactatgaaacaaatgttggagaaatgccgatagatgagcgtcgtataatcgtattcgagtttatcaaaacatattctacacgtccggcagattcgataacttatttgatgaataggtttaaaaatatagatatttatacccgctatgaaggaaagacattattacacgtagcatgtgaatataataatacacacgtaatagattatcttatacgtatcaacggagatataaatgcgttaaccgacaataacaaacacgctacacaactcattatagataacaaagaaaattccccatataccattaattgtttactgtatatacttagatatattgtagataagaatgtgataagatcgttggtggatcaacttccatctctacctatcttcgatataaaatcatttgagaaattcatatcctactgtatacttttagatgacacattttacaatagacacgttaggaatcgcaattctaaaacgtatcgatacgcattttcaaaatacatgtcgtttgataaatacgatggtataataactaaatgtcataaagaaacaatattgctcaaactatccactgttctagacactacactatatgcagttttaagatgccataattcgaaaaagttaagaagatacctcaacgagttaaaaaaatataataacgataagtcctttaaaatatattctaatattatgaatgagagataccttaatgtatattataaagatatgtacgtgtcaaaggtatatgataaactatttcctgttttcacagataaaaattgtctactaacattactaccttcagaaattatatacgaaatattatacatgctgacaattaacgatctttataatatatcgtatccacctaccaaagtatagttgtatttttctcatgcgatgtgtgtaaaaaaactgatattatataaatattttagtgccgtataatgaagatgacgatgaaaatgatggtacatatatatttcgtatcattattgttattgctattccacagttacgccatagacatcgaaaatgaaatcacagaattcttcaataaaatgagagatactctaccagctaaagactctaaatggttgaatccagcatgtatgttcggaggcacaatgaatgatatagccgctctaggagagccattcagcgcaaagtgtcctcctattgaagacagtcttttatcgcacagatataaagactatgtggttaaatgggagaggctagaaaaaaatagacggcgacaggtttctaataaacgtgttaaacatggtgatttatggatagccaactatacatctaaattcagtaaccgtaggtatttgtgtaccgtaactacaaagaatggtgactgtgttcagggtatagttagatctcatattaaaaaacctccttcatgcattccaaaaacatatgaactaggtactcatgataagtatggcatagacttatactgtggaattctttacgcaaaacattataataatataacttggtataaagataataaggaaattaatatcgacgatattaagtattcacaaacgggaaagaaattaattattcataatccagagttagaagatagtggaagatacaactgttacgttcattacgacgacgttagaatcaagatgtaaaatacttacggttataccgtcgcaagaccacaggtttaaactaatactagatccaaaaatcaacgtaacgataggagaacctgccaatataacatgcactgctgtgtcaacgtcattattgattgacgatgtactgattgaatgggaaaatccatccggatggcttataggattcgattttgatgtatactctgttttaactagtagaggcggtatcaccgaggcgaccttgtactttgaaaatgttactgaagaatatataggtaatacatataaatgtcgtggacacaactattattttgaaaaaacccttacaactacagtagtattggagtaaatacacaatgcatttttatatacattactgaataattattattattatttatatcgtatttgtgctataacgcgactatctaggtatttgtatctcaccgatagagaacatataaatgtagactctattaaacagttgtgtaaaatatcagatcctaatagatgtggatgtacggctttagaaatgagttcattaaaatatgtgatatcaacggaacatatttatataattatactattgctgttagtataattattgattccacggaagaactaccaacagttactccaattacaacaacatataattatactatcgatgatagcactactgaagaactacaagtgactcctcatatggatctccatcgatgatacatgtattaaaatactttccgaataagtcttttaaatattgtattaattatgaaaaactatgctatgcgagtatgatacgatactagattttatctctagcgagagatgtcgttagaatcatttatcaacgaatatcgataacatgtgtcatttatacgttaaagtctgtccgtcttctctattgtttagactgtttgtagaatgctgtgatataaacaaactagtagacacaaatatttaactcatgatgaagttgagaatgatatgctttagctaatataaaaatatattaatccactatatattctagacttgatttaaaaccgataaactactactacgtactgtataagttaggagcagaccctaattatgtagatgatagaggtaatacttctgcatctatatgtccacttatgagaaaacgtcatttaataagatgcatcgtgaaaagaaatttattaaagagttggtaaaatatgaaaccgaaagtaaataatataggaaatacacctctacataactacgtatctcaatatgatatcactctcattcctcatccacaacccattaaaaaatggaaattaaagccctctattagcataaacggctacaggtctacctttacaatggcctttccttgtgcccagttcagaccctgtcattgccacgctactaaggactccctgaataccgtggccgacgtcagacattgtctgactgaatacatcctgtgggtttctcatagatggacccatagagaaagcgcagggtctctctacaggcttctcatctctttcagaactgatgcaacggagctctttggtggtgagttgaaggattcacttccgtggagatcattaaatgactccatgaaaaccgccgaagaacttcgtgcaatcattggactttgtactcaatcagctatcgtctctggaagagtcttcaacgataagtatatcgacatactacttatgctgcgaaagattctgaacgagaacgactatctcaccctcttggatcatatccgcactgctaaatactaaatctccttcatgctctctcactacactttttatcatcttatgaggaataattagcaccagaatagctatggattgcacatgtattctatgtcgtctactggatgaagatgtgacgtacaaaaaaataaaactagaaattgaaacgtgtcacaacttatcaaaacatatagatagacgaggaaacaatgcgctacattgttacgtctccaataaatgcgatacagacattaagattgttcgactgttactctctcgcggagtcgagagactttgtagaaacaacgaaggattaactccgctaggagcatacagtaagcatagatacgtaaaatctcagattgtgcatctactgatatccagctattcgaattcctctaacgaactcaagtcgaatataaatgatttcgacttacgtctgctaaaatacctaattgtggataaacggatacgtccgtccaagaatacgaattatgcaatcaatggtctcggattggtggatatatacgtaacgacgcctaatccgagaccagaagtattgctatggcttcttaaatcagaatgttacagcaccggttacgtatttcgtacctgtatgtacaacagtgatatgtgtaagaactctcttcattactatatatcgtctcatagagaatctctatccaaggatgtaattaaatgtttgatcgataacaatgtttccatccaatactactggtcttgctcaaccatagatatagagattattaataaaggatgtggacacgtgtagagtatacgacgtcagccctatattagaggcgtattatctaaacaagcgatttagagtaaccccatataatgtagacatggaaatcgttaatcttcttattgagagacgtcatactcttgtcgacgtaatgcgtagtattacttcgtacgattccagagaatataaccactacatcatcgataacattctaaagagatttagacaacaggatgaatccatcgtacaagccatactgataaactacttacattacggcgatatggtaagtatacctatcattcaatgcatgttggataagacgacggacaacaactttgttaataataatctcgtcgatgtaaacgtcgtaaggtttatcgtggaaaatatggacacgcggctgtaaatcacatatctaacaatggccgtctatgtatgtacggtctgatattatcgagatttaataattgcgggtatcactgttatgaagatgtatttgatatactaagcaagtacatggatgatatagatatgatcgataactctactatattacgcggtcgatgtcaataatatacaatttgcaaagcggttattggaatatggagcgagtgtcacgctcgataatcaatacggccatccagaaaagcagttaccaaagagaagctagttgatttattactgagttaccatcccactctagagactatgattgacgcatttaatagagatatacgctatctatatcctgaaccattattcgcctgtatcagatacgccttaatcctagatgatgattttccttctaaagtaagtatgatatcgccggtcgtcataaggaactaaagcgctatagagcagacattaatagaatgaagaatgcctacatatcaggcgtctccatgtttgatatattatttaaacgaagcaaacgccacagattgagatacgcaaagaacaatgagaggatcgactccattaaataatttatcatggagtgataatgtcctgtttccatggcatattacaaaatcgattccgtccaagatgataaaaacatttaccggcatcataaacacggagtttattttatatgtctcgcataaacattactaaaaaaatatattgttcggttttctttcacatctttaattatgaaaaagtaaatcattatgagatggacgcatcgttcgcgacagtatgtggtacatacctaacgtatttatggacgacggtaagaatgaaggtcacgtttctgtcaacaatgtcgacgcgatcgtgtaacacgactcacaatagaatctgtgaatgctctcccgatcatggatgcaaggcatgtgtttcccaaacaaaatgtggaataggatacggagtatccggagacgtcatctgttctccgtgtggtctcggaacatattctcacaccgtctcttccgcagataaatgcgaacccgtacccagaaatacctttaactatatcgatgtggaaattaacctgtatccagttaacgacacatcgtgtactcggacgaccactaccggtctcagcgaatccatctcaacgtcggaactaactattactatgaatcataaagactgcgatcccgtcttcttaataaggtagcgacttcaggtttctttacaggagaaaggtgtgcactctgaatttcgagattaaatgcaataacaaagattcttcctccaaacagttaacgaaagcaaagaatgatactatcatgccgcattcggagacagtaactctagcgtcgacatctatatactatatagtaataccaatactcaagactacgaaactgatacaatctcttatcatgtgggtaatgtagccatatgcccggtagttgcgatatacataaactgatcactaattccaaacccacccgctttttatagtaagtttttcacccataaatacaataattaatttctcgtaaaagtagaaaatatattctaatttattgcacggtaaggaagtagaatcataaagaacagtactcaatcaatagcaatcatgaaacaatatatcgtactggcatgcatgtgcctgccagtcttcagcaatcatcctcatcgtgtacggaagaagaaaacaaacatcatatgggaatcgatgttattatcaaagtcacaaagcaagaccaaacaccgaccgatgataagatttgccaatccgtaacggaaattacagagtccgagtcagatccagatcccgaggtggaatcagtcgaggatgtagatcctcctaccacttattactccatcatcggtggaggtctgagaatgaactttggattcaccaaatgtcctcagattaaatccatctcagaatccgctgatggaaagactgtgaggtgtctatcgacatcagatgtagcgaagaagagaaagacagcgacatcaagacccatccagtactcgggtctaacatctctcataagaaagtgagttacgaagatatcatcggttcaacgatcgtcgatacaaaatgtgtcaagaatctagagtttagcgttcgtatcggagacatgtgcaaggaatcatctgaacttgaggtcaagtatgtcgacggatcggcatctgaaggtgcaaccgatgatacttcactcatcgattcaacaaaactcaaagcgtgtgtctgaatcgataactctattcatctgaaattggatgagtagggttaatcgaacgattcaggcacaccacgaattaaaaaagtgtaccggacactatattccggtttgcaaaacaaaaagttacctctcgcgacttcttctttttctgtctcaatagtgtgatacgattatgacactattcctatttcctttcagggtatcacaaaaatattaaacctctttctgatggtctcatacaaaaatatttttattctctttctctctttgatggtctcataaaaaatatttttattctctttctctctttgatggtctcataaaatatttttattctctttctctctttgatggtctcataaaaaatatttttattctctttctctctttgatggtctcataaaatatttttattctctttctctctttgatggtctcataaaaaatatttttattctctttctctctttgatggtctcataaaa

SEQ ID NO: 2 - DNA, 60020 bp, synthetic construct
  source 1..60020: mol_type = other DNA
ggcctagcaggccggcctttttttctagacactaaataaatagtaagattaaattaattataaaattatgtatataatattaattataaaattatgtatatgatttactaactttagttagataaattaataatacataaattttagtatattaatattataaattaataatacataaattttagtatattaatattatattttaaatatttatttagtgtctagaaaaaaatgtgtgaccaacgaccgtaggaaactctagagggtaagaaaaatcaatcgctttatagagaccatcagaaagaggtttaatatttttgtgagaccatcgaaggagaaagagataaaacttttttacgactccatcagaaagaggtttaatatttttgtgagaccatcgaagagagaaagagataaaacttttttacgactccatcagaaagaggtttaatatttttgtgagaccatcgaagagagaaagagataaaacttttttacgactccatcagaaagaggtttaatatttttgtgagaccatcgaaggagaaagagataaaacttttttacgactccatcagaaagaggtttaatatttttgtgagaccatcgaaggagaaagagataaaacttttttacgactccatcagaaagaggtttaatatttttgtgagaccatcgaaggagaaagagataaaacttttttacgactccatcagaaagaggtttaatatttttgtgagaccatcgaagagagaaagagataaaacttttttacgactccatcagaaagaggtttaatatttttgtgagaccatcgaaggagaaagagataaaacttttttacgactccatcagaaagaggtttaatatttttgtgagaccatcgaagagagaaagagaataaaaatattttagtgacaccatcagaaagaggtttaatatttttgtgagaccatcgaagagagaaagagataaaacttttttacgactccatcagaaagaggtttaatatttttgtgagaccatcgaaggagaaagagataaaacttttttacgactccatcagaaagaggtttaatatttttgtgagaccatcgaagagagaaagagataaaacttttttacgactccatcagaaagaggtttaatatttttgtgagaccatcgaagagagaaagagataaaacttttttacgactccatcagaaagaccatcgaagagagaaagagaaagagatagttagtctagatatttttcttagtacaaaagtcaatgttttaaaatatatggacaagaatttgtctgtataaaaacttgtgtgaaattttgtaccaaagaaaaaatgtgagcagtatcccctacatggattttactagatcatttatataccaaaaaatattatacgatctacgttttattatatgattttaacgtgtaaattataaacattattttatgatatacaattgtctggtaacctagatgggcataggggatgagtatatgttgttggacgttattgtttaagaaatagttgatgcatcagaaagaggtttaatatttttgtgagaccatcgaagagagaaagagataaaacttttttacgactccatcagaaagaggtttaatatttttgtgagaccatcgaagagagaaagagataaaacttttttatgactccattgaagagagaatgagaataaaaatattttagtgacaccatcagaaagaggtttaatattttttatgagaccatcaaagagagaaagagaataaaaatattttatgactccattgaagagagaaagagaaaatgagaataaaaatattttagtgacaccatcagaaagaggtttaatattttttatgagaccatcaaagagagaaagagaataaaaatatttttgtaaaactttttttatgagaccatcaaagagagaaagagaataaaaatatttttgtaaaactttttttatgagaccatcaaagagagaaagagaataaaaatatttttgtaaaactttttttatgagaccatcaaagagagaaagagaataaaaatatttttgtaaaactttttttatgagaccatcaaagagagaaagagaataaaaatatttttgtaaaactttttttatgagaccatcaaagagagaaagagaataaaaatatttttgtaaaactttttttatgagaccatcaaagagagaaagagaataaaaatatttttgtaaaactttttttatgagaccatcaaagagagaaagagaataaaaatattttatgactccattgaagagagaaagagaataaaaatattttagtgacaccatcagaaagaggtttaatatttttgtgagaccatcgaagagagaaagagaataaaaatattttatgactccattgaagagagaaagagaataaaaatattttagtgacaccatcagaaagaggtttaatattttttatgagaccatcaaagagagaaagagaataaaaatatttttgtaaaactttttttatgagaccatcaaagagagaaagagaataaaaatatttttgtaaaactttttttatgagaccatcaaagagagaaagagaataaaaatatttttgtaaaactttttttatgagaccatcaaagagagaaagagaataaaaatatttttgtaaaactttttttatgagaccatcaaagagagaaagagaataaaaatatttttgtaaaactttttttatgagaccatcaaagagagaaagagaataaaaatattttatgactccattgaagagagaatgagaataaaaatattttagtgacaccatcagaaagaggtttaatatttttgtgagaccatcgaagagagaaagagaataaaaatattttatgactccattgaagagagaaagagaataaaaatattttagtgacaccatcagaaagaggtttaatattttttatgagaccatcaaagagagaaagagaataaaaatatttttgtaaaactttttttatgagaccatcaaagagagaaagagaataaaaatatttttgtaaaactttttttatgagaccatcaaagagagaaagagaataaaaatatttttgtaaaactttttttatgagaccatcaaagagagaaagagaataaaaatatttttgtaaaactttttttatgagaccatcaaagagagaaagagaataaaaatatttttgtaaaactttttttatgagaccatcaaagagagaaagagaataaaaatatttttgtaaaactttttttatgagaccatcaaagagagaaagagaataaaaatatttttgtaaaactttttttatgagaccatcaaagagagaaagagaataaaaatattttatgactccattgaagagagaatgagaataaaaatattttagtgacaccatcagaaagaggtttaatatttttgtgagaccatcgaagagagaaagagaataaaaatattttatgactccattgaagagagaatgagaataaaaatattttagtgacaccatcagaaagaggtttaatattttttatgagaccatcaaagagagaaagagaataaaaatatttttgtaaaactttttttatgagaccatcaaagagagaaagagaataaaaatatttttgtaaaaattataaacattattttatgatatacaattgtctggtaacctagatgggcataggggatgttgataagctcgacgagtatatgttgttggacgttattgtttaagaaatagttgatgcatcagaaagagaataaaaaatattttagtgagaccatcgaagagagaaagagataaaacttttttacgactccatcagaaagaggtttaatatttttgtgagaccatcgaagagagaaagagataaaacttttttacgactccatcagaaagaggtttaatatttttgtgagaccatcgaaggagaaagagataaaacttttttacgactccatcagaaagaggtttaatatttttgtgagaccatcaaagagagaaagagaataaaaatatttttgtaaaactttttttatgagaccatcaaagagagaaagagaataaaaatatttttgtaaaactttttttatgagaccatcaaagagagaaagagaataaaaatatttttgtaaaactttttttatgagaccatcaaagagagaaagagaataaaaatatttttgtaaaactttttttatgagaccatcaaagagagaaagagaataaaaatattttatgactccattgaagagagaatgagaataaaaatattttagtgacaccatcagaaagaggtttaatatttttgtgagaccatcgaagagagaaagagaataaaaatattttatgactccattgaagagagaatgagaataaaaatattttagtgacaccatcagaaagaggtttaatattttttatgagaccatcaaagagagaaagagaataaaaatatttttgtaaaactttttttatgagaccatcaaagagagaaagagaataaaaatatttttgtaaaactttttttatgagaccatcaaagagagaaagagaataaaaatatttttgtaaaactttttttatgagaccatcaaagagagaaagagaataaaaatatttttgtaaaactttttttatgagaccatcaaagagagaaagagaataaaaatattttatgactccattgaagagagaatgagaataaaaatattttagtgacaccatcagaaagaggtttaatatttttgtgagaccatcgaagagagaaagagaataaaaatattttatgactccattgaagagagaaagagaataaaaatattttagtgacaccatcagaaagaggtttaatattttttatgagaccatcaaagagagaaagagaataaaaatatttttgtaaaactttttttatgagaccatcaaagagagaaagagaataaaaatattttatgactccattgaagagagaatgagaataaaaatattttagtgacaccatcagaaagaggtttaatatttttgtgagaccatcgaagagagaaagagaataaaaatattttatgactccattgaagagagaatgagaataaaaatattttagtgacaccatcagaaagaggtttaatatttttgtgagaccatcgaagagagaaagagaataaaaatattttatgactccattgaagagagaatgagaataaaaatattttagtgacaccatcagaaagaggtttaatattttttatgagaccatcaaagagagaaagagaataaaaatatttttgtaaaactttttttatgagaccatcaaagagagaaagagaataaaaatatttttgtaaaactttttttatgagaccatcaaagagagaaagagaataaaaatatttttgtaaaactttttttatgagaccatcaaagagagaaagagaataaaaatatttttgtgagaccatcaaagagagaaagagaataaaaatatttttgtgagaccatcaaagagagaaagagaataaaaatatttttgtgagaccatcaaagagagaaagagaataaaaatattttatgactccattgaagagagaaagagaataaaaatattttagtgacaccatcagaaagaggtttaatatttttgtgagaccatcgaagagagaaagagaataaaaatattttatgactccattgaagagagaaagagaataaaaatattttagtgacaccatcagaaagaggtttaatattttttatgagaccatcaaagagagaaagagaataaaaatattttttatgagaccatcaaagagagaaagagaataaaaatattttatgagaccatcaaagagagaaagagaataaaaatattttttatgagaccatcaaagagagaaagagaataaaaatattttatgagaccatcaaagagagaaagagaataaaaatattttttatgagaccatcaaagagagaaagagaataaaaatatttttgtatgagaccatcagaaagaggtttaatatttttgtgataccctgaaaggaaataggaatagtgtcataatcgtatcacactattgagacagaaaaagaagaagtcgcgagaggtaactttttgttttgcaaaccggaatatagtgtccggtacacttttttaattcgtggtgtgcctgaatcgttcgattaaccctactcatccaatttcagatgaatagagttatcgattcagacacacgctttgagttttgttgaatcgatgagtgaagtatcatcggttgcaccttcagatgccgatccgtcgacatacttgacctcaagttcagatgattccttgcacatgtctccgatacgaacgctaaactctagattcttgacacattttgtatcgacgatcgttgaaccgatgatatcttcgtaactcactttcttatgagagatgttagacccgagtactggatgggtcttgatgtcgctgtctttctcttcttcgctacatctgatgtcgatagacacctcacagtctttccatcagcggattctgagatggatttaatctgaggacatttggtgaatccaaagttcattctcagacctccaccgatgatggagtaataagtggtaggaggatctacatcctcgactgattccacctcgggatctggatctgactcggactctgtaatttccgttacggattggcaaatcttatcatcggtcggtgtttggtcttgctttgtgactttgataataacatcgattcccatatgatgtttgttttcttcttccgtacacgatgaggatgattgctgaagactggcaggcacatgcatgccagtacgatatattgtttcatgattgctattgattgagtactgttctttatgattctacttccttaccgtgcaataaattagaatatattttctacttttacgagaaattaattattgtatttatgggtgaaaaacttactataaaaagcgggtgggtttggaattagtgatcagtttatgtatatcgcaactaccgggcatatggctacattacccacatgataagagattgtatcagtttcgtagtcttgagtattggtattactatatagtatatagatgtcgacgctagagttactgtctccgaatgcggcatgatagtatcattctttgctttcgttaactgtttggaggaagaatctttgttattgcatttaatctcgaaattcagagtgcacacctttctcctgtaaagaaacctgaagtcgctaccttattaagaagacgggatcgcagtctttatgattcatagtaatagttagttccgacgttgagatggattcgctgagaccggtagtggtcgtccgagtacacgatgtgtcgttaactggatacaggttaatttccacatcgatatagttaaaggtatttctgggtacgggttcgcatttatctgcggaagagacggtgtgagaatatgttccgagaccacacggagaacagatgacgtctccggatactccgtatcctattccacattttgtttgggaaacacatgccttgcatccatgatcgggagagcattcacagattctattgtgagtcgtgttacacgatcgcgtcgacattgttgacagaaacgtgaccttcattcttaccgtcgtccataaatacgttaggtatgtaccacatactgtcgcgaacgatgcgtccatctcataatgatttactttttcataattaaagatgtgaaagaaaaccgaacaatatatttttttagtaatgtttatgcgagacatataaaataaactccgtgtttatgatgccggtaaatgtttttatcatcttggacggaatcgattttgtaatatgccatggaaacaggacattatcactccatgataaattatttaatggagtcgatcctctcattgttctttgcgtatctcaatctgtggcgtttgcttcgtttaaataatatatcaaacatggagacgcctgatatgtaggcattcttcattctattaatgtctgctctatagcgctttagttccttatgacgaccggcgatatcatacttactttagaaggaaaatcatcatctaggattaaggcgtatctgatacaggcgaataatggttcaggatatagatagcgtatatctctattaaatgcgtcaatcatagtctctagagtgggatggtaactcagtaataaatcaactagcttctctttggtaactgcttttctggatggccgtattgattatcgagcgtgacactcgctccatattccaataaccgctttgcaaattgtatattattgacatcgaccgcgtaatatagtagagttatcgatcatatctatatcatccatgtacttgcttagtatatcaaatacatcttcataacagtgatacccgcaattattaaatctcgataatatcagaccgtacatacatagacggccattgttagatatgtgatttacagccgcgtgtccatattttccacgataaaccttacgacgtttacatcgacgagattattattaacaaagttgttgtccgtcgtcttatccaacatgcattgaatgataggtatacttaccatatcgccgtaatgtaagtagtttatcagtatggcttgtacgatggattcatcctgttgtctaaatctctttagaatgttatcgatgatgtagtggttatattctctggaatcgtacgaagtaatactacgcattacgtcgacaagagtatgacgtctctcaataagaagattaacgatttccatgtctacattatatggggttactctaaatcgcttgtttagataatacgcctctaatatagggctgacgtcgtatactctacacgtgtccacatcctttattaataatctctatatctatggttgagcaagaccagtagtattggatggaaacattgttatcgatcaaacatttaattacatccttggatagagattctctatgagacgatatatagtaatgaagagagttcttacacatatcactgttgtacatacaggtacgaaatacgtaaccggtgctgtaacattctgatttaagaagccatagcaatacttctggtctcggattaggcgtcgttacgtatatatccaccaatccgagaccattgattgcataattcgtattcttggacggacgtatccgtttatccacaattaggtattttagcagacgtaagtcgaaatcatttatattcgacttgagttcgttagaggaattcgaatagctggatatcagtagatgcacaatctgagattttacgtatctatgcttactgtatgctcctagcggagttaatccttcgttgtttctacaaagtctctcgactccgcgagagagtaacagtcgaacaatcttaatgtctgtatcgcatttattggagacgtaacaatgtagcgcattgtttcctcgtctatctatatgttttgataagttgtgacacgtttcaatttctagttttatttttttgtacgtcacatcttcatccagtagacgacatagaatacatgtgcaatccatagctattctggtgctaattattcctcataagatgataaaaagtgtagtgagagagcatgaaggagatttagtatttagcagtgcggatatgatccaagagggtgagatagtcgttctcgttcagaatctttcgcagcataagtagtatgtcgatatacttatcgttgaagactcttccagagacgatagctgattgagtacaaagtccaatgattgcacgaagttcttcggcggttttcatggagtcatttctgatgaaacatttaatgatctaaatttcagtttatgtttgtaccccgtattcatacttaacaaattggtattacataccattaataatgcaagcataaaaaatcgttagtagatgtttctaaatataggttccgtaagcaaagaatataagaatgaagcggtaatgataaaatcaatcgttatctaaaatgatcatactcatttattttattctattatattaacacatacatttttaacagcaacacattcaatattgtattgttatttttatattatttacacaattaacaatatattattagtttatattactgaattaataatataaaattcccaatcttgtcataaacacacactgagaaacagcataaacacaaaatccatcaaaaatgttgataaattatctgatgttgttgttcgctgctatgataatcagatcattcgccgatagtggtaacgctatcgaaacgacatcgccagaaattacaaacgctacaacagatattccagctatcagattatgcggtccagagggagatggatattgtttacacggtgactgtatccacgctagagatatcgacggtatgtattgtagatgctctcatggttatacaggcattagatgtcagcatgtagtattagtagactatcaacgttcagaaaaaccaaacactacaacgtcatatatcccatctcccggtattatgcttgtattagtaggcattattattattacgtgttgtctattatctgtttataggttcactcgacgaactaaactacctatacaagatatggttgtgccataatttttataaattttttttatgagtatttttacaaaaatgtataaagtgtatgtcttatgtatatttataaaaatgctaaatatgcgatgtatctatgttatttgtatttatctaaacaatacctctacctctagatattatacaaaaattttttatttcggcatattaaagtaaaatctagttaccttgaaaatgaatacagtgggtggttccgtatcaccagtaagaacataatagtcgaatacagtatccgattgagattttgcatacaatactagtctagaaagaaatttgtaatcatcttctgtgacgggagtccatatatctgtatcatcgtcccatgctatattcctgttatcatcattagttaatgaaaataactctcgtgcttcagaaaagtcaaatattgtatccatacatacatctccaaaactatcgcttatacgtttatctttaacgatacctatacctagatggttatttactaacagacattttccagatctattgactataactcctatagtttccacatcaaccaagtaatgatcatctattgttatataacaataacataactcttttccgtttttatcagtatgtatatctatatcaacgtcgtcgttgtagtgaatagtagtcattgatctattatatgaaacggatatgtctagaacggcaattgttttacgtccagttaacactttcgttgatttaaagtctagagtctttgcaaacataatatccttatccgactttatatttcctgtagggtggtataattttattttgcctccacatatcggtgtttccaaatatattactagacaatattccatatagttattagttaagggtacccaattagaacacgtacgcttattatcatcatttggatcgtatttcataaaagttattgtactatcgatgtcaacacattctacattttttaatcgtctatatagtatttttctgatattttctataatatcagaattgtcttccatcggaagttgtatactatcggaatcagttacatgtttaaataattctctgatgtcattccttatacaatcaaattcattattaaacagtttaatagtctgtagacctttatcgtcgtaaatatccattgtcttattagttacgcttatttttatgtgtttttacgttgctttattatattttataagaatgattgtttgacgaatcacgagaactattaagacacattattaggtatatattataaaaaagtttttgattacgatgttataagaggaaagaggacacattaacatcatacatcaattaactacattcttataacatcgtaatcaaaagaattgcaattttgatgtataacaactgtcaatgggttatggaattgtatattacatattatacggtatgttggtaacgacaaataccgatcggtaattgtctgccggtgtaatagaattatatatatctatctattacaccggccttgtatacataataataagttgtggtagtatgatctccatatttataatttaggactttgtattcagtttttttggaatcataaaaaataaaaaaaagttttactaatttaaaattatttacatttttttcactgtttagtcgcggatatggaattcgatcctgccaaaatcaatacatcatctatagatcatgtaacaatattacaatacatagatgaaccaaatgatataagactaacagtatgcattatcacaaaaataaatccacatttggctaatcaatttcgggcttggaaaaaacgtatcgccggaagggactatatgactaacttatctagagatacaggaatacaacaatcaaaacttactgaaactgtcaaaaaaatagaaacatatatggtctatatatacactacaatttagttattaattggataaccgatgtgattatcaatcaatattaagaaggttggtaaattggtacatagctaataatacctatacacccaataatacaacaaccatttctgagttggatatcatcaaaatactggataaatacgaggacgtgtatagagtaagtaaagaaaaagaatgtgaaatttgctatgaagttgtttactcaaaacgatagatactttggtttattggattcgtgtaatcatatattttgcataacatgcatcaatatatggcatagaacacgaagagaaaccggtgcgtcggataattgtcctatatgtcgtacccgttttagaaacataacaatgagcaagttaactaataaataaaaagtttaatttgttgacgacgtatgtcgttattttttctcgtataaaagattaatttgattctaatataatctttagtattggataaatatcaattcaaattaattccattagattatatcataaataaaaatagtagcacgcactacttcagccaaatattcttttttgaaacgccatctatcgtagtgaggacacaagtgaacctataatgagcaaatttattagtatcggttacatgaaggactttacgtagagtggtgattccactatctgtggtacgaacggtttcatcttctttgatgccatcacccagatgttctataaacttggtatcctttgccaaccaatacatatagctaaactcaggcatatgttccacacatcctgaacaatgaaattctccagaagatgttacaatgtctagatttggacatttggtttcaaccgcgttaacatatgagtgaacacacccatacatgaaagcgatgagaaataggattttcatcttgccaaaatatcactagaaaaaatttatttatcaattttaaaggtataaaaaatacttattgttgctcgaatattttgtatttgatggtatacggaagattagaaatgtaggtattatcatcaactgattctatggttttatgtattctatcatgtttcactattgcgttggaaataatatcatatgcttccacatatattttattttgttttaactcataatactcacgtaattctggattattgacatatctatgaataattttagctccatgatcagtaaatattaatgagaacatagtattaccacctaccattatttttttcatctcattcaattcttaattgcaaagatctatataatcattatagcgttgacttatggactctggaatcttagacgatgtacagtcatctataatcatggcatatttaatacattgttttatagcatagtcgttatctacgatgttagatatttctctcaatgaatcaatcacacaatctaatgtaggtttatgacataatagcattttcagcagttcaatgtttttagattcgttgatggcaatggctatacatgtatatccgttatttgatctaatgttgacatctgaaccggattctagcagtaaagatactagagattgtttattatatctaacagccttgtgaagaagtgtttctcctcgtttgtcaatcatgttaatgtctttaagataaggtaggcaaatgtttatagtactaagaattgggcaagcataagacatgtcacaaagaccctttttgtatgtataagtgtaaaaattataacattcatagttggatttacataggtgtccaatcgggatctctccatcatcgagataattgatggcatctcccttccttttttagtagatatttcatcgtgtaagaatcaatattaatatttctaaagtatccgtgtatagcctctttatttaccacagttccatattccactagagggatatcgccgaatgtcatatactcaattagtatatgttggaggacatccgagttcattgttttcaatatcaaaaagatggtttccttatcatttctccatagtggtacaatactacacattattccgtgcggctttccattttccaaaaacaatttgaccaaatctacatctttattgtatctataatcactatttagataatcagccataattactcgagtgcaacatgttagatcgtctatatatgaataagccgtgttatctattcctttcattaacaatttaacgatgtctatatctatatgagatgacttaatataatattgaagagctgtacaatagtttttatctataaaagacggcttgattccgtgattaattagacatttaacaacttccggacgcacatatgctctcgtatccgactctgaatacagatgagagatgatatacagatgcaatacggtaccgcaatttcgtagttgataatcatcatacgcgtatcagtactcgtcctcataaagaacactgcagccattttctatgaacaaatcaataatttcaggaacaggatcatctgtcattacataattttctataactgaacgatggttttcacatttaacactcaagtcaaatccatgttctaccaacacctttatcaagtcaacgtctacatttttggatttcatatagctgaatatattaaagtcatttatgttgctaaatccagtggcttctagtagagccatcgctatatcctttaactttaacatgtctactatttgtgtattcttctaatggggtagctgtctccaatttttgcgtaatggattagtgccactgtctagtagtagtttgacgacctcgacattattacaatgctcattaaaaaggtatgcgtgtaaagcattattcttgaattggttcctggtatcattaggatctctgtctctcaacatctgtttaagttcatcgagagccacctcctcattttccaaatagtcaaacattttgactgaatgagctactgtgaactctatacacccacacaactaatgtcattaaatatcatgtcaaaaacttgtacaattattaataaaaataatttagtgtttaaattttaccagttccagattttacacctccgttaaccccactttttacaccactggacgatcctcctccccacattccaccgccaccagatgtataagttttagatcctttattactaccatcatgtccatggataaagacactccacatgccgccactaccccctttagaagacatattaataagacttaaggacaagtttaacaataaaattaatcacgagtaccctactaccaacctacactattatatgattatagtttctatttttacagtaccttaactaaagtctctagtcacaagagcaatactaccaacctacactattatatgattatagtttctatttttataggaacgcgtacgagaaaatcaaatgtctaatttctaacggtagtgttgataaacgattatcgtcaatggatacctcctctatcatgtcgtctattttcttactttgttctattaacttattagcattatatattatttgattataaaacttatattgcttattagcccaatctgtaaatatcggattattaacatatcgtttctttgtaggtttatttaacatgtacatcactgtaagcatgtccgtaccatttattttaatttgacgcatatccgcaatttctttttcgcagtcggttataaattctatatatgatggatacatgctacatgtgtacttataatcgactaatatgaagtacttgatacatattttcagtaacgatttattattaccacctatgaataagtacctgtgatcgtctaggtaatcaactgttttcttaatacattcgatggttggtaatttactcagaataatttccaatatcttaatatataattctgctatttctgggatatatttatctgccagtataacacaaatagtaatacatgtaaacccatattttgttattatattaatgtctgcgccattatctattaaccattctactaggctgacactatgcgacttaatacaatgataaagtatactacatccatgtttatatcatcaatatacggcttacaaagttttagtatcgataacacatccaactcacgcatagagaaggtagggaataatggcataatatttattaggttatcatcattgtcattatctacaactaagtttccattttttaaaatatactcgacaactttaggatctctattgccaaatttttgaaaatatttatttatatgcttaaatctatataatgtagctccttcatcaatcatacatttaataacattgatgtatactgtatgataagatacatattctaacaatagatcttgtatagaatctgtatatcttttaagaattgtggatattattacgtaaactattacacaattctaaaatataaaacgtatcacggtcgaataatagttgatcaactatataattatcgattttgtgatttttcttcctaaactgtttacgtaaatagttagatagaatattcattagttcatgaccactatagttactatcgaataacgcgtcaaatatttcccgtttaatatcgcatttgtcaagataataatagagtgtggtatgttcacgataagtataataacgcatctctttttcgtgtgaaattaaatagtttattacgtccaaagatgtagcataaccatcttgtgacctagtaataatataataatagagaactgttttacccattctatcatcataatcagtggtgtagtcgtaatcgtaattgtctaattcatcatcccaattataatattcaccagcacgtctaatctgttctattttgatcttgtatccatactgtatgttgctacatgtaggtattcctttatccaataatagtttaaacacatctacattgggatttgatgttgtagcgtatttttctacaatattaataccatttttgatactatttatttctatacctttcgaaattagtaatttcaataagtctatatcgatgttatcagaacatagatattcgagtatatcaaaatcattgatatttttatagtcgactgacgacaataacaaaatcacaacatcgtttttgatattattatttttcttggtaacgtatgcctttaatggagtttcaccatcatactcatataatggatttgcaccactttctatcaatgattgtgcactgctggcatcgatgttaaatgttttacaactatcatagagtatcttatcgttaaccatgattggttgttgatgctatcgcattttttggtttctttcatttcagttatgtatggatttagcacgtttgggaagcatgagctcatatgatttcagtactgtagtgtcagtactattagtttcaataagatcaatctctagatctatagaatcaaaacacgataggtcagaagataatgaatatctgtaggcttcttgttgtactgtaacttctcgttttgttagatgtttgcatcgtgctttaacatcaatggtacaaattttatcctcgctttgtgtatcatattcgtccctactataaaattgtatattcagattatcatgagatgtgtatacgctaacggtatcaataaacggagcacaccatttagtcataaccgtaatccaaaaatttttaaagtatatcttaacgaaagaagttgtgtcattgtctacggtgtatggtactagatcctcataagtgtatatatctagagtaatgtttaatttatcaaatggttgataatatggatcctcatgacaatttccgaagatggaaatgagatatagacatgcaataaatctaattgcggacatggttactccttaaaaaaatacgaataatcaccttggctatttagtaagtgtcatttaacactatactcatattaatccatggactcataatctctatacgggattaacggatgttctatatacggggatgagtagttttcttctttaactttatactttttactaatcatatttagactgatgtatgggtaatagtgtttaaagagttcgttctcatcatcagaataaatcaatatctctgtttttttgttatacagatgtattacagcctcatatattacgtaatagaacgtgtcatctaccttattaactttcaccgcatagttgtttgcaaatacggttaatcctttgacctcgtcgatttccgaccaatctgggcgtataatgaatctaaactttaatttcttgtaatcattcgaaataatttttagtttgcatccgtagttatcccctttatgtaactgtaaatttctcaacgcgatatctccattaataatgatgtcgaattcgtgctgtatacccatactgaatggatgaacgaataccgacggcgttaatagtaatttactttttcatctttacatattgggtactagttttactatcataagtttataaattccacaagctactatggaataagccaaccatcttagtataacacacatgtcttaaagtttattaattaattacatgttgttttatatatcgctacgaatttaaacagagaaatcagtttaggaaaaaaaaatatctatctacatcatcacgtctctgtattctacgatagagtgctactttaagatgagacatatccgtgtcatcaaaaatatactccattaaaatgattattccggcagcgaacttgatattggatatatcacaacctttgttaatatctacgacaatagacagcagtcccatggttccataaacagtgagtttatctttctttgaagagatattttgtagagatcttataaaactgtcgaatgacatcgcatttatatctttagctaaatcgtatatgttaccatcgtaatatctaaccgcgtctatcttaaacgtttccatcgctttaaagacgtttccgatagatggtctcatttcatcagtcatactgagccaacaaatataatcgtgtataacatctttgatagaatcagactctaaagaaaacgaatcggctttattatacgcattcatgataaacttaatgaaaaatgtttttcgttgtttaagttggatgaatagtatgtcttaataattgttattatttcattaattaatatttagtaacgagtacactctataaaaacgagaatgacataactagttatcaaagtgtctaggacgcgtaattttcatatggtatagatcctgtaagcattgtctgtattctggagctattttctctatatctaatttctgaacgttcaccaatgtctctagccactttggcactaatagcgatcattcgcttagcgtcttctatattattaactggttgattcaatctatctagcaatggaccgtcggacagcgtcattctcatgttcttaatcaatgtacatacatcgccgtcatctaccaattcatccaacaacataagctttttaaaatcatcattataataggtttgatcgttgtcatttctccaaagaatatatctaataagtagagtcctcatgattagttaacaactattttttatgttaaatcaattagtacaccgctatgtttaatacttattcatattttagtttttaggattgagaatcaatacaaaaattaatgcatcattaattttagaaatacttagtttccacgtagtcaatgaaacatttgaactcatcgtacaggacgttctcgtacaggacgtaactataaaccggtttatatttgttcaagatagatacaaatccgataactttttttacgaattctacgggatccactttaaaagtgtcataccgggttctttttatttttttaaacagattaatggtgtgatgttgattaggtcttttacgaatttgatatagaatagcgtttacatattctccataatggtcaatcgccatttgttcgtatgtcataaattctttaattatatgacactgtgtattatttagttcatccttgttcatcattaggaatctatccaatatggcaattatactagaactataggtgcgttgtatacacatattgatgtgtctgtttatacaatccatgctactaccttcgggtaaaattgtagcatcatataccatttctagtactttaggttcattgttatccattgcagaggacgtcatgacgcatcctaaaaaaatatattatttttatgttattttgttaaaaataatcatcgaatacgaatcatccagtccactgaatagcaaaatctttactattttggtatcttccaatgtggctgcctgatgtaatggaaattcattctctagaagatttttcaatgctccagcgttcaacaacgtacatactagacgcacgttattatcagctattgcataatacaaggcactatgtccatggacatccgccttaaatgcatctttgctagagagaaagcttttcagctgcttagacttccaagtattaattcgtgacagatccatgtctgaaacgagacgctaattagtgtataatttttgtcatattgcaccagaattaataatatctctaatagatctgattagtagatacatggctatcgcaaaacaacatatacacatttaataaaaataatatttattaagaaaattcagatttcacgtacccatcaatataaataaaataatgattccttacaccgtacccatattaaggagattctaccttacccataaacaatataaatccagtaatatcatgtctgatgatgaacacaaatggtgtattaaattccagtttttcaggagatgatctcgccgtagctaccataatagtagatgcctctgctacagttccttgttcgtcgacatctatctttgcattctgaaacattttataaatatataatgggtccctagtcatatgtttaaacgacgcattatctggattaaacatactaggagccatcatttcggctatcgacttaatatccctcttattttcgatagaaaatttagggagtttaagattgtacactttattccctaattgaaacgaccaatagtctaattttgcagccgtaatagaatctgtgaaatgggtcatattatcacctattgccaggtacatactaatattagcatccttatacggaaggcgtaccatgtcatattctttgtcatcgattgtgattgtatttccttgcaatttagtaactacgttcatcatgggaaccgttttcgtaccgtacttattagtaaaactagcattgcgtgttttagtgatatcaaacggatattgccatatacctttaaaatatatagtattaatgattgcccatagagtattattgtcgagcatattagaatctactacattagacataccggatctacgttctactatagaattaattttattaaccgcatctcgtctaaagtttaatctatataggccgaatctatgatattgttgataatacgacggtttaatacacacagtattatctacgaaactttgataagttagatcagtgtacgtatatttagatgttttcagcttagctaatcctgatattaattctgtaaatgctggacccagatctctttttctcaaatccatagtcttcaataattctattctagtattacctgatgcaggcaatagcgacataaacatagaaaacgaataaccaaacggtgagaagacaatattatcatcttgaatatttttatacgctactataccggcattggtaaatccttgtagacgataggtagacgctgaacacgttaacgatagtatcaataacgcaatcatgattttatggtattaataattaaccttatttttatgttcggtataaaaattattgatgtctacacatccttttgtaattgacatctatatatccttttgtataatcaactctaatcactttaacttttacagttttccctaccagtttatccctatattcaacatatctatccatatgcatcttaacactctctgccaagatagcttcagagtgaggatagtcaaaaagataaatatatagagcataatcattctcgtatactctgccctttattacatcgcccgcattgggcaacgaataacaaaatgcaagcatcttgttaacgggctcgtaaattgggataaaaattatgtttttatatctattttattcaagagaatattcaggaatttctttttccggttgtatctcatcgcagtatatatcatttgtacattgtttcatattttttaatagtttacaccttttagtaggactagtatcgtacaattcatagctgtattttgaattccaatcacgcataaaaatatcttctaattgttgacgaagacctaatccatcatccggtgtaatattaatagatgctccacatgtatccgtaaagtaatttcctgtccaatttgaggtacctatataggccgttttatcggttaccatatatttggcatggtttaccctagaatacggaatgggaggatcagcatctggtacaataaatagctttacttctatatttatgtttttagattttagcatagcgatagatcttaaaaagtttctcatgataaacgaagatcgttgccagcaactaatcaatagcttaacggatacttgtctgtctatagcggatcttcttaattcatcttctatataaggccaaaacaaaattttacccgccttcgaataaataatagggataaagttcataacagatacataaacgaatttactcgcatttctaatacatgacaataaagcggttaaatcattggttctttccatagtacatagttgttgcggtgcagaagcaataaatacagagtgtggaacaccacttacgttaatactaagaggatgatctgtattataatacgacggataaaagtttttccaattatatggtagattgttaactccaagataccagtatacctcaaaaatttgagtgagatccgctgccaagttcctattattgaagatcgcaatacccaattctttgacctgagttagtgatctccaatccatgttagcgcttcctaaataaatatgtgtattatcagatatccaaaattttgtatgaagaactcctcctaggatatttgtaatatctatgtatcgtacttcaactccggccatttgtagtctttcaacatcctttaatggtttgttagatttattgacggctactctaactcgtactcctcttttgggtaattgtacaatctcgtttaatattatcgtgccgaaattcgtacccacttcatccgataaactccaataaaaagatgatatatctagtgtttttgtggtattggatagaatttccctccacatgttaaatgtagacaaatatactttatcaaattgcatacctataggaatagtctctgtaatcactgcgattgtattatccggattcattttatttgttaaaagaataatcctatatcacttcactctattaaaaatccaagtttctatttctttcatgactgattttttaacttcatccgtttccttatgaagatgatgtttggcaccttcataaatttttatttctctattacaatttgcatgttgcatgaaataatatgcacctaaaacatcgctaatctcattgtttgttccctggagtatgagagtcggggtgttaatcttggaaattatttttctaaccttgttggtagccttcaagacctgactagcaaatccagccttaattttttcatgattgattaatgggtcgtattggtatttataaactttatccatatctctagatactgattctggacatagctttccgactggcgcatttggtgtgatggttcccataagtttggcagctagcagattcagtcttgaaacagcatctgcattaactagaggagacattagaatcattgctgtaaacaagtttggattatcgtaagaggctagtatagaaattgttgctcccatggaatgacccaataagtagatttaatagttaccacgtgctgtaccaaagtcatcaatcatcattttttcaccattacttcttccatgtccaatatgatcatgtgagaatactaaaattcctaacgatgatatgttttcagctagttcgtcataacgtccagaatgtttaccagctccatgacttatgaatactaatgccttaggatatgtaatcattgtccagattgaacatacagtttgcactcatgattcacgttatataactatcaatattaacagttcgtttgatgatcatattatttttatgttttattgataattgtaaaaacatacaattaaatcaatatagaggaaggagacggctactgtcttttgtgagatagtcatggcgactaaattagattatgaggatgctgttttttactttgtggatgatgataaaatatgtagtcgcgactccatcatcgatctaatagatgaatatattacgtggagaaatcatgttatagtgtttaacaaagatattaccagttgtggaagactgtacaaggaattgatgaagttcgatgatgtcgctatacggtactatggtattgataaaattaatgagattgtcgaagctatgagcgaaggagaccactacatcaattttacaaaagtccatgatcaggaaagtttattcgctaccataggaatatgtgctaaaatcactgaacattggggatacaaaaagatttcagaatctagattccaatcattgggaaacattacagatctgatgaccgacgataatataaacatcttgatactttttctagaaaaaaaattgaattgatgatataggggtcttcataacgcataattattacgttagcattctatatccgtgttaaaaaaaattatcctatcatgtatttgagagttttatatgtagcaaacatgatagctgtgatgccaataagctttagatattcacgcgtgctagtgttagggatggtattatctggtggtgaaatgtccgttatataatctacaaaacaatcatcgcatatagtatgcgatagtagagtaaacatttttatagtttttactggattcatacatcgtctacccaattcggttatgaatgaaattgtcgccaatcttacacccaaccccttgttatccattagtatagtattaacttcgttatttatgtcataaactgtaaatgattttgtagatgccatatcatacatgatattcatgtccctattataatcattactaactttatcacaatatatgttgataatatctatatatgatctagtctttgtgggcaactgtctatacaagtcgtctaaacgttgtttactcatatagtatcgaacagccatcattacatggtcccgttccgttgatagataatcgagtatgttagtggacttgtcaaatctatataccatattttctggaagtggatatacatagtcgtgatcaacattattgctagcctcatcttctatatcctgtactataccatctacataatctacgatattattacacataaacatcgacaacatactattgtttattatctaagtcctgttgatccaaacccttgatctcctctatttgtactatctagagattgtacttcttccagttctggataatatatacgttgatagattagctgagctattctatctccagtatttacattaaacgtacattttccattattaataagaatgactcctatgtttcccctataatcttcgtctattacaccacctcctatatcaatgccttttagtgacagaccagacctaggagctattctaccatagcaaatcttaggcatggacatactaatatctgtcttaattaactgtctttctcctggagggatagtataatcgtaagcgctatacaaatcatatccggcagcacccggcgattgcctagtaggagatttagctctgttagtttccttaacaaatctaactggtgagttaatattcatgttgaacataaaactaatattttatttcaaaattatttaccatcccatatattccatgaataagtgtgatgattgtacacttctatagtatctatatacgattcacgataaaatcctcctatcaatagcagtttattatccactatgatcaattctggattatccctcggataaataggatcatctatcagagtccatgtattgctggattcacaataaaattccgcatttctaccaaccaagaataaccttctaccgaacactaacgcgcatgatttataatgaggataataagtggatggtccaaactgccactgatcatgattgggtagcaaatattctgtagttgtatcagtttcagaatgtcctcccattacgtatataacattgtttatggatgccactgctggattacatctaggtttcagaagactcggcatattaacccaagcagcatccccgtggaaccaacgctcaacagatgtgggatttggtagacctcctactacgtataatttattgttagcgggtatcccgctagcatacagtctggggctattcatcggaggaattggaatccaattgtttgatatataatttacagctatagcattgttatgtatttcattgttcatccatccaccgatgagatatactacttctccaacatgagtacttgtacacatatggaatatatctataatttgatccatgttcataggatactctatgaatggatacttgtatgatttgcgtggttgtttatcacaatgaaatattttggtacagtctagtatccattttacattatttatacctctgggagaaagataatttgacctgattacatttttgataaggagtagcagatttcctaatttatttcttcgctttatataccacttaatgacaaaatcctcatctggaacatttagttcatcgctttctagaataagtttcatagatagataatcaaaattgtctatgatgtcatcttccagttccaaaaagtgtttggcaataaagtttttagtatgacataagagattggatagtccgtattctatacccatcatgtaacactcgacacaatattcctttctaaaatctcgtaggataaagtttatacaagtgtagatgataaattctacagaggttaatatagaagcacgtaataaattgacgacgttatgactatctatatatacctttccagtatatgagtaaataactatagaagttagactgtgaatgtcaaggtctagacaaaccctcgtaactggatctttatttttcgtgtatttttgacgtaaatgtgtgcgaaagtaaggagataactttttcaatatcgtagaattgactattatattgcctcctatggcatcaataattgttttgaatttcttagtcatagacaatgctaatatattcttacagtacacagtattgacaaatatcggcatttatgtttctttaaaagtcaacatctaaagaaaaatgattatcttcttgagacataactcccattttttggtattcacccacacgtttttcgaaaaaattagttttaccttctaatgatatattttccatgaaatcaaacggattggtaacattataaatttttttaaatcccaattcagaaatcaatctatccgcgacgaattctatatatgttttcatcatttcacaattcattcctataagtttaactggaagagccgcagtaagaaattcttgttcaatggataccgcatctgttataatagatctaacggtttcttcactcggtggatgcaataaatgtttaaacatcaaacatgcgaagtcgcagtgtagaccctcgtctctactaatcaattcgttggaaaacgtgagtccgggcattaggccacgctttttaagccaaaatatggaagcgaatgatccggaaaagaagattccttctactgcagcaaaggcaataagtctctctccataaccggcgctgtcatgtatccacttttgagcccaatcggccttcttttttacacaaggcatcgtttctatggcattaaagagatagtttttttcattactatctttaacataagtatcgatcaaaagactatacatttccgaatgaatgttttcaatggccatctgaaatccgtagaaacatctagcctcggtaatctgtacttctgtacaaaatcgttccgccaaattttcattcactattccgtcactggctgcaaaaaacgccaatacatgttttataaaatatttttcgtctggtgttagtttattccaatcattgatatctttagatatatctacttcttccactgtccaaaatgatgcctctgcctttttatacatgttccagatgtcatgatattggattgggaaaataacaaatctatttggatttggtgcaaggatgggttccataactaaattaacaataacaataaattttttttcagttatctatatgcctgtacttggatcttttgtacatcgatatcgccgcaatcactacaataattacaagtattattgatagcattgttattagtactatcataattaaattatcgttattatcattttgtaattgtgacatcatactagataaatcgtttgcgagattgttgtgggaagcgggcatggaggatgaattatcgttattattatttaaagcctcccattcggattcacaaatatggcgcgcgttcaacattttatggaaacagataacaagaaaactcgtcatcgttcaaatttttaacgatagtaaaccgattaaacgtcgagctaatttctaacgctagcgactctgttggatatgggtttccagatatatatcttttcagttcccctacgtatctataatcatctgtaggaaatggaagatatttccatttatctactgttcctaatatcatatgtggtggtgtagtagaaccattaagcgcgaaagatgttatttcgcatcgtattttaacttcgcaataatttctggttagataacgcactctaccagtcaagtcaatgatattagcctttacagatatattcatagtagtcgtaacgatgactccatcttttagatgcgatactcctttgtatgtaccagaatcttcgtacctcaaactcgatatatttaaacaagttaatgagatattaacgcgttttatgaatgatgatatataaccagaagttttatcctcggtggctagcgctataaccttatcattataataccaactagtgtgattaatatgtgacacgttagtgtgggtacaaatatgtacattatcgtctacgtcgtattcgatacatccgcatacagccaacaaatataaaatgacaaatactctaacgccgttcgtacccatcttgatgcggtttaataaatgttttgatttcaatttattgtaaaaaaagattcggttttatactgttcgatattctcattgcttatattttcatctatcatctccacacagtcaaatccgtggttagcatgcacctcatcaaccggtaaaagactatcggactcttctatcattataactctagaatatttaatttggtcattattaatcaagtcaattatcttatttttaacaaacgtgagtattttactcattttttataaaaacttttagaaatatacagactctatcgtgtgtctatatcttctttttatatccaatgtatttatgtctgatttttcttcatttatcatatataatggtccaaattctacacgtgcttcggattcatccagatcattaaggttcttataattgtaacatccttctcttccctcttctacatcttccttcttattcttattcttagcgtcacagaatctaccacagcaggatcccatgacgagcgtcatattaaactaatccattttcaattataatatacgattagtaatgaccattaaaataaaaatattcttcataaccggcaagaaagtgaaaagttcacattgaaactatgtcagtagtatacatcatgaaatgatgatatatatatactctattttggtggaggattatatgatataattcgtggataatcattcttaagacacatttcttcattcgtaaatcttttcacgttaaatgagtgtccatattttgcaatttcttcatatgatggcggtgtacgtggacgaggctgctcctgttcttgttgtagtcgccgactgtcgtgtctgcgtttagatccctccattatcgcgattgcgtagatggagtactattttataccttgtaattaaatttttttattaattaaacgtataaaaacgttccgtatctgtatttaagagccagatttcgtctaatagaacaaatagctacagtaaaaataactagaataattgctacacccactagaaaccacggatcgtaatacggcaatcggttttcgataataggtggaacgtatattttatttaaggacttaacaattgtctgtaaaccacaatttgcttccgcggatcctgtattaactatctgtaaaagcatatgttgaccgggcggagccgaacattctccgatatccaatttctgtatatctataatattattaacctccgcatacgcattacagttcttttctagcttggataccgcactaggtacatcgtctagatctattcctatttcctcagcgatagctcttctatccttttccggaagcaatgaaatcacttcaataaatgattcaaccatgagtgtgaaactaagtcgagaattactcatgcatttgttagttattcggagcgcgcaatttttaaactgtcctataacctctcctatatgaatagcacaagtgacattagtagggatagaatgttgagctaatttttgtaaataactatctataaaaagattatacaaagttttaaactctttagtttccgccatttatccagtctgagaaaatgtctctcataataaatttttccaagaaactaattgggtgaagaatggaaacctttaatctatatttatcacagtctgttttggtacacatgatgaattcttccaatgccgtactaaattcgatatctttttcgatttctggatatgtttttaataaagtatgaacaaagaaatggaaatcgtaataccagttatgtttaactttgaaattgttttttattttcttgttaatgattccagccacttgggaaaagtcaaagtcgtttaatgccgatttaatacgttcattaaaaacaaactttttatcctttagatgaattattattggttcattggaatcaaaaagtaagatattatcgggtttaagatctgcgtgtaaaaagttgtcgcagcatggtagttcgtaaattttaatgtataacagagccatctgtaaaaagataaactttatgtattgtaccaaagatttaaatcctaatttgatagctagctcggtatctactttatctgccgaatacagtgctaggggaaaaattataatatttcctctttcgtattcgtagttagttctcttttcatgttcgaaaaagtgaaacatgcggttaaaatagtttataacattaatattactgttaataactgccggataaaagtgggatagtaatttcacgaatttgatactgtcctttctctcgttaaacgcctttaaaaaaactttagaagaatatctcaatgatagttcctgaccatccatagtttgtatcaataatagcaacatatgaagaacacgtttatacagagtatgtaaaaatgttaatttatagtttaatcccatggcccacgcacacacgattaattttttttcatctccctttagattgttgtatagaaatttgggtactgtgaactccgccgtagtttccatgggactatataattttgtggcctcgaatacaaattttactacatagttatctatcttaaagactataccatatcctcctgtagatatgtgataaaaatcgtcgtttataggataaaatcgtttatccttttgttggaaaaaggatgaattaatgtaatcattctcttctatctttagtagtgtttccttattaaaattcttaaaataatttaacaatctaactgatggagcccaattttggtgtaaatctaattgggacattatattgttaaaatacaaacagtctcctaatataacagtatctgataatctatggggagacatccattgatattcaggggatgaatcattggcaacacccatttattgtacaaaaagccccaatttacaaacgaaagtccaggtttgatagagacaaactattaactattttgtctctgtttttaatttctttggtaatgaaattattcacaatatcagtatcttctttatctaccagagattttactaacttgataaccttggctgtctcattcaatagggtagtaatatttgtatgtgtgatattgatatcttttagaagtgattctttgatggtgccagcatacgaattacaataatgcagaaactcggttaacatgcaggaattatagtaagccaattccaattgttgcctgtgttgtattagagtgtcaatatgagcaatggtgtccttgcgtttctctgatagaatgcgagcagcgattttggcgttatcatttgacgatatttctggaatgacgaatcctgtttctactaactttttggtaggacaaagtgaaacaatcaagaagatagcttctcctcctatttgtggaagaaattgaactcctctagatgatctccttgacagatattggaccgaattacagaagtacctggaatgtaaagccctgaaaccccctcattttttaagcagattgttgccgtaaatcctgcactatgcccaagatagagagctcctttggtgaatccatctctatgtttcagtttaaccaagaaacagtcagctggtctaaaatttccatctctatctaatacagcatctaacttgatgtcaggaactatgaccggttatgttatatgtaacattgagtaaatccttaagttcataatcatcactgtcatcagttatgtacgatccaaacaatgtttctactggcatagtggatacgaagatgctatccatcagaatgtttccctgattagtattttctatatagctattcttctttaaacgattttccaaatcagtaactatgttcatttttttaggagtaggacgcctagccagtatggaagaggattttctagatcctctcttcaacatctttgatctcaatggaatgcaaaaccccatagtgtaacaaccaacgataaaaataatattgtttttcactttttataattttaccatctgactcatggattcattaatatctttataagagctactaacgtataattctttataactgaactgagatatatacaccggatctatggtttccataattgagtaaatgaatgctcggcaataactaatggcaaatgtataaaacaacgaaattatactagagttgttaaagttaatattttctatgagctgttccaataaattatttgttgtaactgcgttcaagtcataaatcatcttgatactatccagtaaaccgtttttaagttctggaatattattatcccattgtaaagcccctaattcgactatcgaatatcctgctctgatagcagtttcaatatcgacggacgtcaatactgtaataaaggtggtagtattgtcatcatcgtgataaactactggaatatggtcgttagtaggtacggtaactttacacaacgcgatatataactttccttttgtaccatttttaacgtagttgggacgtcctgcagggtattgttttgaagaaatgatatcgagaacagatttgatacgatatttgttggattcctgattatttactataatataatctagacagatagatgattcgataaatagagaaggtatatcgttggtaggataatacatccccattccagtattctcggatactctattaatgacactagttaagaacatgtcttctattctagaaaacgaaaacatcctacatggactcattaaaacttctaacgctcctgattgtgtctcgaatgcctcgtacaaggatttcaaggatgccatagattctttgaccaacgatttagaattgcgtttagcatctgatttttttattaaatcgaatggtcggctctctggtttgctaccccaatgataacaatagtcttgtaaagataaaccgcaagaaaatttatacgcatccatccaaataaccctagcaccatcggatgatattaatgtattattatagattttccatccacagttattgggccagtatactgttagcaacggtatatcgaatagattactcatgtaacctactagaatgatagttcgtgtactagtcataatatctttaatccaatctaagaaatttaaaattagattttttacactgttaaagttaacaaaggtattacccggatacgtggatatcatatatggtattggtccattatcagtaatagctccataaactgatacggcgatggtttttatatgtgtttgatctaacgaggaagaaattcgcgcccacaattcatctctagatatgtatttaatatcaaacggtaacacatcaatttcgggacgcgtatatgtttctaaatttttaatccaaatataatgatgacctatatgccctattatcatactgtcaactatagtacacctagagaacttacgatacatctgtttcctataatcgttaaattttacaaatctataacatgctaaaccttttgacgacaaccattcattaatttctgatatggaatctgtattctcaataccgtatcgttctaaagccagtgctatatctccctgttcgtgagaacgctttcgtataatatcgatcaacggataatctgaagtttttggagaataatatgactcatgatctatttcgtccataaacaatctagacataggaattggaggcgatgatcttaattttgtgcaatgagtcgtcaatcctataacttctaatattgtaatattcatcatcgacataacactatctatgttatcatcgtatattagtataccatgaccttcttcatttcgtgccaaaatgatatacagtcttaaatagttacgcaatatctcaatagtttcataattgttagctgttttcatcaaggtttgtatcctgtttaacatgatggcgttctatacgtttctattttttaaatttttaacgatttactgtggctagatacccaatctctctcaaatatttttttagcctcgcttacaagctgtttatctatactattaaaactgacgaatccgtgattttggtaatgggttccgtcgaaatttgccgaagtgatatgaacatattcgtcgtcgactatcaacaattttgtattattctgaatagtgaaaaccttcacagatagatcattttgaacacacaacgcgtctagacttctggcggttgccatagaatatacgtcgttcttatcccaattaccaactagaagtctgatcttaactcctctattaatggctgcttctataatggagttgtaaatgtcgggccaatagtagctattaccgtcgacacgtgtagtgggaactatggccaaatgttcaatatctatactagtcttagccgacttgagtttatcaataactacatcagtgtctagatctctagaatatcccaataggtgttccggagaatcagtaaagaacactccacctataggattcttaatatgatacgcagtgctaactggcagacaacaagccgcagagcataaattcaaccatgaattttttgcgctattaaaggctttaaaagtatcaaatcttctacgaagatctgtggccagcgggggataatcagaatatacacctaacgttttaatcgtatgtatagatcctccagtaaatgacgcgtttcctacataacatctttcattatctgacacccaaaaacaaccgagtagtagtcccacattattttttttatctatattaacggttataaaatttatatccgggcagtgactttgtagctctcccagatttcttttccctcgttcatctagcaaaactattattttaatccctttttcagatgcctcttttagtttatcaaaaataagcgctcccctagtcgtactcagaggattacaacaaaaagatgctatgtatatatatttcttagctagagtgataatttcgttaaaacattcaaatgttgttaaatgatcggatctaaaatccatattttctggtagtgtttctaccagcctacattttgctcccgcaggtaccggtgcaaatggccacatttagttaacataaaaacttatacatcctgttctatcaacgattctagaatatcatcggctatatcgctaaaattttcatcaaagtcgacatcacaacctaactcagtcaatatattaagaagttccatgatgtcatcttcgtctatttctatatccgtatccattgtagattgttgaccgattatcgagtttaaatcattactaatactcaatccttcagaatacaatctgtgtttcattgtaaatttataggcggtgtatttaagttggtagattttcaattatgtatcaatatagcaacagtagttcttgctcctccttgattctagcatcctcttcattattttcttctacgtacataaacatgtccaatacgttagacaacacaccgacgatggcggccgccacagacacgaatatgactaaaccgatgaccatttaaaaacccctctctagctttcacttaaactgtatcgattattcttttagaacatgtataatataaaaacattattctatttcgaatttaggcttccaaaaatttttcatccgtaaaccgataataatatatatagacttgttaatagtcggaataaatagattaatgcttaaactatcatcatctccacgattagagatacaatatttacattttttttgctgtttcgaaactttatcaatacacgttaatacaaacccaggaaggagatattgaaactgaggctgttgaaaatgaaacggtgaatacaataattcagataatgtaaaatcatgattccgtattctgatgatattagaactgctaatggatgtcgatggtatgtatctaggagtatctattttaacaaagcatcgatttgctaatatacaattatcattttgattaattgttattttattcatattcttaaaaggtttcatatttatcaattcttctacattaaaaatttccatttttaatttatgtagccccgcaatactcctcattacgtttcattttttgtctataatatccattttgttcatctcggtacatagattatccaattgagaagcgcatttagtagttttgtacattttaagtttattgacgaatcgtcgaaaactagttatagttaacattttattatttgataccctgatattaatacccctgccgttactattatttataactgatgtaatccacgtaacattggaattaactatcgatagtaatgcatcgacgcttccaaaattgtctattataaactcaccgataatttttttattacatgttttcatattcattaggattattaaatctttaatcttactacgattgtatgcgttgatattgcaagacgtcattctaaaagacggaggatctccatcaaatgccagacaatcacgtacaaagtacatggaaataggttttgttctattgcgcatcatagatttatatagaacacccgtagaaatactaatttgttttactctataaaatactaatgcatctatttcatcgttttgtataacgtctttccaagtgtcaaattccaaatttttttcattgatagtaccaaattcttctatctctttaactacttgcatagataggtaattacagtgatgcctacatgccgttttttgaaactgaatagatgcgtctagaagcgatgctacgctagtcacaatcaccactttcatatttagaatatatatatgtaaaaatatagtagaatttcattttgttttttttctatgctataaatgaattctcattttgcatctgctcatactccgttttatatcaataccaaagaaggaagatatctggttctaaaagccgttaaagtatgcgatgttagaactgtagaatgcgaaggaagtaaagcttcctgcgtactcaaagtagataaaccctcatcacccgcgtgtgagagaagaccttcgtccccttccagatgcgagagaatgaataacccaggaaaacaagttccgtttatgaggacggacatgctacaaaatatgttcgcggctaatcgcgataatgtagcttctagacttttgtcctaaaatacaattatatccttttcgatattaataaatccgtgtcgtccaggttttttatctctttcagtatgtgaatagataggtattttatctctattcatcatcgaatttaagagatccgataaacattgtttgtattctccagatgtcagcatctgatacaacaatatatgtgcacataaacctctggcacttatttcatgtaccttccccttatcactaaggagaatagtatttgagaaatatgtatacatgatattatcatgaattagatatacagaatttgtaacactctcgaaatcacacgatgtgtcggcgttaagatctaatatatcactcgataacacattttcatctagatacactagacattttttaaagctaaaatagtctttagtagtaacagtaactatgcgattattttcatcgatgatacatttcatcggcatattattacgcttaccatcaaagactataccatgtgtatatctaacgtattctagcatggttgccatacgcgcattaaacttttcaggatctttggatagatcttccaatctatctatttgagaaaacatttttatcatgttcaatagttgaaacgtcggatccactatatagatattatctataaagattttaggaactacgttcatggtatcctggcgaatattaaaactatcaatgatatgattatcgttttcatcttttatcaccatatagtttctaagatatgggattttacttaatataatattatttcccgtaataaattttattagaaatgccaaatctataagaaaagtcctcgaattagtttgaagaatatctatatcgccgtaccgtatatttggattaattagatatagagaatatgatccgtaacatatacaacttttattatggcgtctaagatattcttccatcaacttattaacatttttgactagggaagatacattatgacgtcccattacttttgccttgtctattactgcgacgttcatagaatttagcatatctcttgccaattcttccattgatgttacattataagaaattttagatgaaattacatttggagctttaatagtaagaactcctaatatgtccgtgtatgtggtcactaatacagattgtagttctataatcgtaaataatttacctatattatatgtttgagtctgtttagaaaagtagctaagtatacgatcttttatttctgatgcagatgtatcaacatcggaaaaaaatctttttttattcttttttactaaagatacaaatatgtctttgttaaaaacagttattttctgaatatttctagcttgtaattttaacatatgatattcgttcacactaggtactctgcctaaataggtttctataatctttaatgtaatattaggaaaagtattctgatcaggattcctattcattttgaggatttaaaactctgattattgtctaatatggtctcaacacaaactttttcacagagcgatagagtttttgataactcgtttttcttaagaaatataaaactactgtctccagagctcgctctatcttttattttatttaattcgatacaaactcctgatactggttcagaaagtaattcattaattttcagtcctttatagaagatatttaatatagataatacaaaatcttcagtttttgatatcgatctgattgatcctagaactagatatattaataacgtgctcattaggcagtttatggcagcttgataattagatatagtatattccagttcatatttattagataccgcattgcccagattttgatattctatgaattcctctgaaaataaatccaaaataactagacattctattttttgtggattagtgtactctcttccctctatcatgttcactactggtgtccacgatgataaatatctagagggaatataatatagtccataggatgccaatctagcaatgtcgaataactgtaattttattcttcgctcttcattatgaattgattcttgaggtataaacctaacacaaattatattattagacttttcgtatgtaatgtctttcatgttataagtttttaatcctggaatagaatctattttaatgaggcttttaaacgcagagttctccaacgagtcaaagcataatactctgttggttttcttatatacgatgttacgattttcttctttgaatggaataggtttttgaattagtttataattacaacataatagataaggaagtgtgcaaatagtacgcggaaaaaacataatagctcccctgttttcatccatggttttaagtaaatgatcactggcttctttagtcaatggatattcgaacattaaccgtttcatcatcattggacagaatccatatttcttaatgtaaagagtgatcaaatcattgtgtttattgtaccatcttgttgtaaatgtgtattcggttatcggatctgctcctttttctattaaagtatcgatgtcgatctcgtctaagaattcaactatatcgacatatttcatttgtatacacataaccattactaacgtagaatgtataggaagagatgtaacgggaacagggtttgttgattcgcaaactattctaatacataattcttctgttaatacgtcttgcacgtaatctattatagatgccaagatatctatataattattttgtaagatgatgttaactatgtgatctatataagtagtgtaataattcatgtatttcgatatatgttccaactctgtctttgtgatgtctagtttcgtaatatctatagcatcctcaaaaaatatattcgcatatattcccaagtcttcagttctatcttctaaaaaatcttcaacgtatggaatataataatctattttacctcttctgatatcattaatgatatagtttttgacactatcttctgtcaattgattcttattcactatatctaagaaacggatagcgtccctaggacgaactactgccattaatatctctattatagcttctggacataattcatctattataccagaattaatgggaactattccgtatctatctaacatagttttaagaaagtcagaatctaagacctgatgttcatatattggttcatacatgaaatgatctctattgatgatagtgactatttcattctctgaaaattggtaactcattctatatatgctttccttgttgatgaaggatagaatatactcaatagaatttgtaccaacaaactgttctcttatgaatcgtatatcatcatctgaaataatcatgtaaggcatacatttaacaattagagacttgtctcctgttatcaatatactattcttgtgataatttatgtgtgaggcaaatttgtccacgttctttaattttgttatagtagatatcaaatccaatggagctacagttcttggcttaaacagatatagtttttctggaacgaattctacaacattattataaaggactttgggtagataagtgggatgaaatcctattttaattaatgcgatagccttgtcctcgtgcagatatccaaacgcttttgtgatagtatggcattcattgtctagaaacgctctacgaatatctgtgacagatatcatctttagagaatatactagtcgcgttaatagtactacaatttgtattttttaatctatctcaataaaaaaattaatatgtatgattcaatgtataactaaactactaactgttattgataactagaatcagaatctaatgatgacgtaaccaagaagtttatctactgccaatttagctgcattatttttagcatctcgtttagattttccatctgccttatcgaatactcttccgtcgatatctacacaggcataaaatgtaggagagttactaggccccactgattcaatacgaaaagaccaatctctcttagttatttggcagtactcattaataatggtgacagggttagcatctttccaatcaataatttttttagccggaataacatcatcaaaagacttatgatcctctctcattgatttttcgcgggatacatcatctattatggcgtcagccataacatcagcatccggcttatccgcctccgttgtcataaaccaacgaggaggaatatcgtcggagctgtacaccatagcactacgttgaagatcgtacagagctttattaacttctcgcttctccatattaagttgtctagttagttgtgcagcagtagctccttcgattccaatgtttttaatagccgcacacacaatctctgcgtcagaacgctcgtcaatatagatcttagacatttttagagagaactaacacaaccagcaataaaactaatttattttatcatttttttattcatcatcctctggtggttcgtcgtttctatcgaatgtggatctgattaacccgtcatctataggtgatgctggttctggagattctggaggagatggattattatctggaagaatctctgttatttccttgttttcatgtatcgattgcgttgtaacattaagattgcgaaatgctctaaatttgggaggcttaaagtgttgtttgcaatctctacacgcatgtctaactagtggaggttcgtcagcggctctagtttgaatcatcatcggcgtagtattcctacttttacagttaggacacggtgtattgtatttctcgtcgagaacgttaaaataatcgttgtaactcacatcctttattttatctatattgtattctactcctttcttaatgcattttataccgaataagagatagcgaaggaattctttttcggtgccgctagtacccttaatcatatcacatagtgttttatattccaaatttgtggcaatagacggtttatttctatacgatagtttgtttctggaatcctttgagtattctataccaatattattctttgattcgaatttagtttcttcgatattagattttgtattacctatattcttgatgtagtactttgatgatttttccatggcccattctattaagtcttccaagttggcatcatccacatattgtgatagtaattctcggatatcagtagcggctaccgccattgatgtttgttcattggatgagtaactactaatgtatacattttccatttataacacttatgtattaactttgttcatttatattttttcattattatgttgatattaacaaaagtgaatatatatgttaataattgtattgtggttatacggctacaatttcataatgagtggaagtcagtgtccgatgatcaatgacgatagctttactctgaaaagaaagtatcaaatcgatagtgcggagtcaacaataaaaatggataagaagaggataaagtttcagaatagagccaaaatggtaaaagaaataaatcagacaataagagcagcacaaactcattacgagacattgaaactaggatacataaaatttaagagaatgattaggactactactctagaagatatagcaccatctattccaaataatcagaaaacttataaactattctcggacatttcagccatcggcaaagcatcacagaatccgagtaagatggtatatgctctgctgctttacatgtttcccaatttgtttggagatgatcatagattcattcgttatagaatgcatccaatgagtaaaatcaaacacaagatcttctctcctttcaaacttaatcttattagaatattagtggaagaaagattctataataatgaatgcagatctaataaatggagaataattggaacacaagttgataaaatgttgatagctgaatctgataaatatacaatagatgcaaggtataacctaaaacccatgtatagaatcaagggaaaatctgaagaagataccctctttatcaaacagatggtagaacaatgtgtgacatcccaggaattggtggaaaaagtgttgaagatactgtttagagatttgttcaagagtggagaatacaaagcgtacagatacgatgatgatgtagaaaatggatttattggattggatacactaaaattaaacattgttcatgatatagttgaaccatgtatgcctgttcgtaggccagtggctaagatactgtgtaaagaaatggtaaataaatactttgagaatccgctacatattattggtaaaaatcttcaagagtgcattgactttgttagtgaataggcatttcatctttctccaatactaattcaaattgttaaattaataatggatagtataaatagttattagtgataaaatagtaaaaataattattagaataagagtgtagtatcatagataactctcttctataaaaatggattttattcgtagaaagtatcttatatacacagtagaaaataatatagattttttaaaggatgatacattaagtaaagtaaacaattttaccctcaatcatgtactagctctcaagtatctagttagcaattttcctcaacacgttattactaaggatgtattagctaataccaatttttttgttttcatacatatggtacgatgttgtaaagtgtacgaagcggttttacgacacgcatttgatgcacccacgttgtacgttaaagcattgactaagaattatttatcgtttagtaacgcaatacaatcgtacaaggaaaccgtgcataaactaacacaagatgaaaaatttttagaggttgccgaatacatggacgaattaggagaacttataggcgtaaattatgacttagttcttaatccattatttcacggaggggaacccatcaaagatatggaaatcatttttttaaaactgtttaagaaaacagacttcaaagttgttaaaaaattaagtgttataagattacttatttgggcttacctaagcaagaaagatacaggcatagagtttgcggataatgatagacaagatatatacactctatttcaacaaactggtagaatagtccatagcaatctaacagaaacgtttagagattatatctttcccggagataagactagctattgggtgtggttaaacgaaagtatagctaatgatgcggatattgttcttaatagacacgccattaccatgtatgataaaattcttagttatatatactctgagataaaacaaggacgcgttaataaaaacatgcttaagttagtttatatctttgagcctgaaaaagatatcagagaacttctgctagaaatcatatatgatattcctggagatatcctatctattattgatgcaaaaaacgacgattggaaaaaatattttattagtttttataaagctaattttattaacggtaatacatttattagtgatagaacgtttaacgaggacttattcagagttgttgttcaaatagatcccgaatatttcgataatgaacgaattatgtctttattctctacgagtgctgcggacattaaacgatttgatgagttagatattaataacagttatatatctaatataatttatgaggtgaacgatatcacattagatacaatggatgatatgaagaagtgtcaaatctttaacgaggatacgtcgtattatgttaaggaatacaatacatacctgtttttgcacgagtcggatcccatggtcatagagaacggaatactaaagaaactgtcatctataaaatccaagagtagacggctgaacttgtttagcaaaaacattttaaaatattatttagacggacaattggctcgtctaggtcttgtgttagatgattataaaggagacttgttagttaaaatgataaaccatcttaagtctgtggaggatgtatccgcattcgttcgattttctacagataaaaaccctagtattcttccatcgctaatcaaaactattttagctagttataatatttccatcatcgtcttatttcaaaggtttttgagagataatctatatcatgtagaagaattcttggataaaagcatccatctaaccaagacggataagaaatatatacttcaattgataagacacggtagatcatagaacagaccaaatatattattaataatttgtatatacatagatataattatcacacatttttgataaatgggaactgctgcaacaattcagactcccaccaaattaatgaataaagaaaatgcagaaatgattttggaaaaaattgttgatcatatagttatgtatattagtgacgaatcaagtgattcagaaaataatcctgaatatattgattttcgtaacagatacgaagactatagatctctcattataaaaagtgatcacgagtttgtaaagctatgtaaaaatcatgcagagaaaagttctccagaaacgcaacaaatgattatcaaacacatatacgaacaatatcttattccagtatctgaagtactattaaaacctataatgtccatgggtgacataattacatataacggatgtaaagacaatgaatggatgctagaacaactctctaccctaaactttaacaatctccgcacatggaactcatgtagcataggcaatgtaacgcgtctgttttatacattttttagttatctgatgaaagataaactaaatatataagtataatcccattctaatactttaacctgatgtattacctgcatcttattagaatattaacctaactaaaagacataacatagttgataaaaagcggtaggatataaatattatggctgccaccgttccgcgttttgacgacgtgtacaaaaatgcacaaagaagaattctagatcaagaaacattttttagtagaggtctaagtagaccgttaatgaaaaacacatatctatttgataattacgcgtatggatggataccagaaactgcaatttggagtagtagatacgcaaacttagatgcaagtgactattatcccatttcgttgggattacttaaaaagttcgagtttctcatgtctctatataaaggtcctattcccgtatatgaagaaaaagtaaatactgaattcattgctaatggatcgttctctggtagatacgtatcatatcttcgaaagttttctgcccttccaacaaacgagtttattagttttttgttactgacttccattccaatctataatatcttgttctggtttaaaaatactcagtttgatattactaaacacacattattcagatacgtctatacagataatgccaaacacctggcgttggctaggtatatgcatcaaacaggagactataagcctttgtttagtcgtctcaaagagaattatatatttaccggtcccgttccaataagtatcaaagatatagatcaccctaatcttagtagagcaagaagtccatccgattatgagacattagctaatattagtactatattgtactttaccaagtatgatccggtattaatgtttttattgttttacgtacctgggtattcaattactacaaaaattactccagccgtagaatatctaatggataaactgaatctaacaaagagcgacgtacaactgttgtaaattattttatgcttcgtaaaatgtaggttttgaaccaaacattctttcaaagaatgagatgcataaaactttattatccaatagattgactatttcggacgtcaatcgtttaaagtaaacttcgtaaaatattctttgatcactgccgagtttaaaacttctatcgataattgtttcatatgttttaatatttacaagttttttggtccatggtacattagccggacaaatatatgcaaaataatatcgttctccaagttctatagtttctggattatttttattatattcagtaaccaaatacatattagggttatctgcggatttataatttgagtgatgcattcgactcaacataaataattctagaggagacgatctactatcaaattcggatcgtaaatctgtttctaaagaacggagaatatctatacatacctgattagaattcatccgtccttcagacaacatctcagacagtctggtcttgtatgtcttaatcatattcttatgaaacttggaaacatctcttctagtttcactagtacctttattaattctctcaggtacagattttgaattcgacgatgctgagtatttcatcgttgtatatttcttcttcgattgcataatcagattcttatataccgcctcaaactctattttaaaattattaaacaatactctattattaatcagtcgttctaactctttcgctatttctatagacttatcgacatcttgactgtctatctctgtaaacacggagtcggtatctccatacacgctacgaaaacgaaatctgtaatctataggcaacgatgttttcacaatcggattaatatctctatcgtccatataaaatggattacttaatggattggcaaaccgtaacataccgttagataactctgctccatttagtaccgattctagatacaagatcattctacgtcctatggatgtgcaactcttagccgaagcgtatgagtatagagcactatttctaaatcccatcagaccatatactgagttggctactatcttgtacgtatattgcatggaatcatagatggccttttcagttgaactggtagcctgttttagcatctttttatatctggctctctctgccaaaaatgttcttaatagtctaggaatggttccttctatcgatctatcgaaaattgctatttcagagatgaggttcggtagtctaggttcacaatgaaccgtaatatatctaggaggtggatatttctgaagcaagagctgattatttatttcttcttccaatctattggtactaacaacgacaccgactaatgtttccggagatagatttccaaagatacacacattaggatacagactgttataatcaaagattaatacattattactaaacattttttgttttggagcaaataccttaccgccttcataaggaaacttttgttttgtttctgatctaactaagatagttttagtttccaacaatagctttaacagtggacccttgatgactgtactcgctctatattcgaataccatggattgaggaagcacatatgttgacgcacccgcgtctgtttttgtttctactccataatactcccacaaatactgacacaaacaagcatcatgaatacagtatctagccatatctaaagctatgtttagattataatccttatacatctgagctaaatcaacgtcatcctttccgaaagataatttatatgtatcattaggtaaagtaggacatgatagtacgactttaaatccattttcccaaatatctttacgaattactttacatataatatcctcatcaacagtcacataattacctgtggttaaaacctttgcaaatgcagcggctttgcctttcgcgtccgtagtatcgtcaccgatgaacgtcatttctctaactcctctatttaatactttacccatgcaactgaacgcgttcttggatatagaatccaatttgtacgaatccaatttttcagatttttgaatgaatgaatatagatcgaaaaatatagttccattattgttattaacgtgaaacgtagtattggccatgccgcctactcccttatgactagactgatttctctcataaatacagagatgtacagcttcctttttgtccggagatctaaagataatcttctctcctgttaataactctagacgattagtaatatatctcagatcaaagttatgtccgttaaaggtaacgacgtagtcgaacgttagttccaacaattgtttagctattcgtaacaaaactatttcagaacatagaactagttctcgttcgtaatccatttccattagtgactgtatcctcaaacatcctctatcgacggcttcttgtatttcctgttccgttaacatctcttcattaatgagcgtaaacaataatcgtttaccacttaaatcgatataacagtaacttgtatgcgagattgggttaataaatacagaaggaaacttcttatcgaagtgacactctatatctagaaataagtacgatcttgggatatcgaatctaggtatttttttagcgaaacagttacgtggatcgtcacaatgataacatccattgttaatctttgtcaaatattgctcgtccaacgagtaacatccgtctggagatatcccgttagaaatataaaaccaactaatattgagaaattcatccatggtggcattttgtatgctgcgtttctttggctcttctatcaaccacatatctgcgacggagcattttctatctttaatatctagattataacttattgtctcgtcaatgtctatagttctcatctttcccaacggcctcgcattaaatggaggaggagacaatgactgatatatttcgtccgtaactacgtaataaaagtaatgaggaaatcgtataaatacggtctcgccatttcgacatctggatttcagatataaaaatctgttttcaccgtgactttcaaaccaattaatgcaccgaacatccatttatagaatttagaaatatattttcatttaaatgaatcccaaacattggggaagagccgtatggaccattatttttatagtactttcgcaagcgggtttagacggcaacatagaagcgtgtaaacgaaaactatatactatagtcagcactcttccatgtcctgcatgtagacggcacgcgactatcgctatagaggacaataatgtcatgtctagcgatgatctgaattatatttattattttttcatcagattatttaacaatttggcatctgatcccaaatacgcgatcgatgtgacaaaggttaaccctttataaacttaacccattataaaacttatgattagtcacgactgaaataaccgcgtgattattttttggtataattctacacggcatggtttctgtaactatgaattcaacccccgttacattagtgaaatctttaacaaacagcaagggttcgtcaaagacataaaactcattgtttacaatcgaaatagaccccctatcacacttaaaataaaaaatatccttatcctttaccaccaaataaaattctgattggtcaatgtgaatgtattcacttaacagttccacaaatttatttattaactccgaggcacatacatcgtcggtattttttatggcaaactttactcttccagcatccgtttctaaaaaaatattaacgagttccatttatatcatccaatattattgaaatgacgttgatggacagatgatacaaataagaaggtacggtacctttgtccaccatctcctccaattcatgctctattttgtcattaactttaatgtatgaaaacagtacgccacatgcttccatgacagtgtgtaacactttggatacaaaatgtttgacattagtataattgtccaagactgtcaatctataatagatagtagctataatatattctatgatggtattgaagaagatgacaatcttggcatattgatcatttaacacagacatggtatcaacagatagcttgaatgaaagagaatcagtaattggaataagcgtcttctcgatagagtgtccgtataccaacatgtctgatattttgatgtattccattaaattatttagttttttctttttattctcgttaaacagcatttctgtcaacggaccccaacatcgttgaccgattaagttttgattgatttttccgtgtaaggcgtatctagtcagatcgtatagcctatccaataatccatcatctgtgcgtagatcacatcgtacactttttaattctctatagaagagcgacagacagcaatttctttattctctacagatgtaagatacttgaagacattcctatgatgatgcagaattttggataacacggtattgatggtatctgttaccataattcctttgatggctgatagtgtcagagcacaagatttccaatctttgttttgatatctatatcagacagcatggtgcgtctgacaacacaaggattaagacggaaagatgaaatgattctctcaacatcttcaatggataccttgctattttttctggcattatctatatgtgcgagaatatcctctagagaatcagtatcctttttgatgatagtggatctcaatgacatgggacgtctaaaccttcttattctatcaccagattgcatggtgatttgtcttctttcttttatcataatgtaatctctaaattcatcggcaaattgtctatatctaaaatcataatatgagatgtttacctctacaaatatctgttcgtccaatgttagagtatctacatcagttttgtattccaaattaaacatggcaacggatttaattttatattcctctattaagtcctcgtcgataataacagaatgtagataatcatttaatccatcgtacatggttggaagatgcttgttgacaaaatctttaattgtcttgatgaaggtgggactatatctaacatcttgattaataaaatttataacattgtccataggatactttgtaactagttttatacacatctcttcatcggtaagtttagacagaatatcgtgaacaggtggtatattatattcatcagatatacgaagaacaatgtccaaatctatattgtttaatatattatatagatgtagcgtagctcctacaggaatatctttaactaagtcaatgatttcatcaaccgttagatctattttaaagttaatcatataggcattgatttttaaaaggtatgtagccttgactacattctcattaattaaccattccaagtcactgtgtgtaagaagattatattctatcataagcttgactacatttggtcccgataccattaaagaattcttatgatataaggaaacagattttaggtactcatctactctacaagaattttggagagccttaacgatatcagtgacgtttattatttcaggaggaaagaatctaacattgagaatatcggaattaatagcttccagatacagtgattttggcaatagtccgtgtaatccataatccagtaacacgagctggtgcttgctagacaccttttcaatgtttaatttttttgaaataagctttgataaagccttcctcgcaaattccggatacatgaacatgtcggcgacatgattaagtattgttttttcattattttctcaacaagttctcaataccccaatagatgatagaatatcacccaatgcgtccatgttgtctatttccaacaggtcgctatatccaccaatagaagtttttccaaaaaagattctaggaacagttctaccaccagtaatttgttcaaaatagtcacgcaattcattttcgggtttaaattctttaatatcgacaatttcatacgctcctcttttgaaactaaacttatttagaatatccagtgcatttctacaaaaaggacatgtatacttgacaaaaattgtcactttgttattggccaacctttgttgtacaaattcctcggccattttaatatttaagtgatataaaactatctcgacttatttaactctttagtcgagatatatggacgcagatagctatatgatagccaactacagaaggcaaacgctataaaaaacataattacgacgagcatatttataaatatttttattcagcattacttgatatagtaatattaggcacagtcaaacattcaaccactctcgatacattaactctctcattttctttaacaaattctacaatatcttcgtaaaaagattcttgaaactttttagaatatctatcgactctagatgaaatagcgttcgtcaacatactatgttttgtatacataaaggcgcccattttaacagtttctagtgacaaaatgctagcgatcctaggatcctttagaatcacatagattgacgattcgtctctcttagtaactctagtaaaataatcatacaatctagtacgcgaaataatattatccttgacttgaggagatctaaacaatctagttttgagaacatcgataagttcatcgggaatgacatacatactatctttaatagaactcttttcatccagttgaatggattcgtccttaaccaactgattaatgagatcttctattttatcattttccagatgatatgtatgtccattaaagttaaattgtgtagcgcttctttttagtctagcagccaatactttaacatcactaatatcgatatacaaaggagatgatttatctatggtattaagaattcgtttttcgacatctgtcaaaaccaattcctttttgcctgtatcatccagttttccatcctttgtaaagaaattattttctactagactattaataagactgataaggattcctccataattgcacaatccaaactttttaacaaaactagactttacaagatctacaggaatgcgtaattcaggtttcttagcttgtgattttttcttttgtggacattttcttgtgaccaactcatctaccatttcattgattttagcagtgaaataagctttcaatgcacgggcactgatactattgaaaacgagttgatcttcaaattccgccatttaagttcaccaaacaacttttaaatacaaatatatcaatagtagtagaataagaactataaaaaaaataataattaaccaataccaaccccaacaaccggtattattagttgatgtgactgttttctcatcacttagaacagatttaacaatttctataaagtctgtcaaatcatcttccggagaccccataaatacaccaaatatagcggcgtacaacttatccatttatacattgaatattggcttttctttatcgctatcttcatcatattcatcatcaatatcaacaagtcccagattacgagccagatcttcttctacattttcagtcattgatacacgttcactatctccagagagtccgataacgttagccaccacttctctatcaatgattagtttcttgagtgcgaatgtaatttttgtttccgttccggatctatagaagacgataggtgtgataattgccttggccaattgtctttctcttttactgagtgattctagttcaccttctatagatctgagaatggatgattctccagtcgaaacatattctaccatggatccgtttaatttgttgatgaagatggattcatccttaaatgttttctctgtaatagtttccaccgaaagactatgcaaagaatttggaatgcgttccttgtgcttaatgtttccatagacggcttctagaagttgatacaacataggactagccgcggtaacttttatttttagaaagtatccatcgcttctatcttgtttagatttatttttataaagtttagtctctccttccaacataataaaagtggaagtcatttgactagataaactatcagtaagttttatagagatagacgaacaattagcgtattgagaagcatttagtgtaacgtattcgatacattttgcattagatttactaatcgattttgcatactctataacacccgcacaagtctgtagagaatcgctagatgcagtaggtcttggtgaagtttcaactctcttcttgattaccttactcatgattaaacctaaataattgtactttgtaatataatgatatatattttcactttatctcatttgagaataaaaatgtttttgtttaaccactgcatgatgtacagatttcggaatcgcaaaccaccagtggttttattttatccttgtccaatgtgaattgaatgggagcggatgcgggtttcgtacgtagatagtacattcccgtttttagaccgagactccatccgtaaaaatgcatactcgttagtttggaataactcggatctgctatatggatattcatagattgactttgatcgatgaaggctcccctgtctgcagccatttttatgatcgtcttttgtggaatttcccaaatagttttataaactcgcttaatatcttctggaaggtttgtattctgaatggatccaccatctgccataatcctattcttgatctcatcattccataattttctctcggttaaaactctaaggagatgcggattaactacttgaaattctccagacaatactctccgagtgtaaatattactggtatacggttccaccgactcattatttcccaaaatttgagcagttgatgcagtcggcataggtgccaccaataaactatttctaagaccgtatgttctgattttatcttttagaggttcccaattccaaagatccgacggtacaacattccaaagatcatattgtagaataccgttactggcgtacgatcctacatatgtatcgtatggtccttccttctcagctagttcacaactcgcctctaatgcaccgtaataaatggtttcgaagatcttcttatttagatcttgtgcttccaggctatcaaatggataatttaagagaataaacgcgtccgctaatccttgaacaccaataccgataggtctatgtctcttattagagatttcagcttctggaataggataataattaatatctataattttattgagatttctgacaattactttgaccacatccttcagtttgagaaaatcaaatcgcccatctattacaaacatgttcaaggcaacagatgccagattacaaacggctacctcattagcatccgcatattgtattatctcagtgcaaagattactacacttgatagttcctaaattttgttgattactctttttgttacacgcatccttataaagaatgaatggagtaccagtttcaatctgagattctataatcgctttccagacgactcgagcctttattatagatttgtatctcctttctctttcgtatagtgtatacaatcgttcgaactcgtctccccaaacattgtccaatccaggacattcatccggacacatcaacgaccactctccgtcatccttcactcgtttcataaagagatcaggaatccaaagagctataaatagatctctggttctatgttcctcgtttcctgtattctttttaagatcgaggaacgccataatatcagaatgccacggttccaagtatatggccataactccaggccgtttgtttcctccctgatctatgtatctagcggtgttattataaactctcaacattggaataataccgtttgatataccattggtaccggagatatagcttccactggcacgaatattactaattgatagacctattccccctgccattttagagattaatgcgcatcgttttaacgtgtcatagataccctctatgctatcatcgatcatgttaagtagaaaacagctagacatttggtgacgactagttcccgcattaaataaggtaggagaagcgtgcgtaaaccatttttcagaaagtagattgtacgtctcaatagctgagtctatatcccattgatgaattcctactgcgacacgcattaacatgtgctgaggtctttcaacgatcttgttgtttattttcaacaagtaggatttttccaaagttttaaaaccaaaatagttgtatgaaaagtctcgttcgtaaataataaccgagttgagtttatccttatatttgttaactatatccatggtgatacttgaaataatcggagaatgtttcccatttttaggattaacatagttgaataaatcctccatcacttcactaaatagtttttttgtttccttgtgtagatttgatacggctattctggcggctagaatggcataatccggatgttgtgtagtacaagtggctgctatttcggctgccagagtgtccaattctaccgttgttactccattatatattccttgaataaccttcatagctattttaataggatctatatgatccgtgtttaagccataacataattttctaatacgagacgtgattttatcaaacatgacattttccttgtatccatttcgtttaatgacaaacatttttgttggtgtaataaaaaaaattatttaacttttcattaatagggatttgacgtatgtagcgtacaaaattatcgttcctggtatatagataaagagtcctatatatttgaaaatcgttacggctcgattaaactttaatgattgcatagtgaatatatcattaggatttaactccttgactatcatggcggcgccagaaattaccatcaaaagcattaatacagttatgccgatcgcagttagaacggttatagcatccaccatttatatctaaaaattagatcaaagaatatgtgacaaagtcctagttgtatactgagaattgacgaaacaatgtttcttacatattttttttttattagtaaccgacttaatagtaggaactggaaaactagacttgattattctataagtatagatacccttccaaataatattctctttgataaaagttccagaaaatgtagaattttttaaaaagttatcttttgctattaccaagattgtgtttagacgcttattattaatatgagtgatgaaatccacaccgcctctagatatcgcttttatttccacattagatggtaaatccaatagtgaaactatctttttaggaatgtatggactcgcgtttagaggagtgaacgtcttaggcgtcggaaaggggccggcctttttttctagacactaaataaatagtaagattaaattaattataaaattatgtatataatattaattataaaattatgtatatgatttactaactttagttagataaattaataatacataaattttagtatattaatattataaattaataatacataaattttagtatattaatattatattttaaatatttatttagtgtctagaaaaaaaggcctagcaggcc

SEQ ID NO: 3 - DNA, 63035 bp, synthetic construct
  source 1..63035: mol_type = other DNA
ggcctagcaggcctttttttctagacactaaataaatagtaagattaaattaattataaaattatgtatataatattaattataaaattatgtatatgatttactaactttagttagataaattaataatacataaattttagtatattaatattataaattaataatacataaattttagtatattaatattatattttaaatatttatttagtgtctagaaaaaaaggccggccataaaaatgtttttgtttaaccactgcatgatgtacagatttcggaatcgcaaaccaccagtggttttattttatccttgtccaatgtgaattgaatgggagcggatgcgggtttcgtacgtagatagtacattcccgtttttagaccgagactccatccgtaaaaatgcatactcgttagtttggaataactcggatctgctatatggatattcatagattgactttgatcgatgaaggctcccctgtctgcagccatttttatgatcgtcttttgtggaatttcccaaatagttttataaactcgcttaatatcttctggaaggtttgtattctgaatggatccaccatctgccataatcctattcttgatctcatcattccataattttctctcggttaaaactctaaggagatgcggattaactacttgaaattctccagacaatactctccgagtgtaaatattactggtatacggttccaccgactcattatttcccaaaatttgagcagttgatgcagtcggcataggtgccaccaataaactatttctaagaccgtatgttctgattttatcttttagaggttcccaattccaaagatccgacggtacaacattccaaagatcatattgtagaataccgttactggcgtacgatcctacatatgtatcgtatggtccttccttctcagctagttcacaactcgcctctaatgcaccgtaataaatggtttcgaagatcttcttatttagatcttgtgcttccaggctatcaaatggataatttaagagaataaacgcgtccgctaatccttgaacaccaataccgataggtctatgtctcttattagagatttcagcttctggaataggataataattaatatctataattttattgagatttctgacaattactttgaccacatccttcagtttgagaaaatcaaatcgcccatctattacaaacatgttcaaggcaacagatgccagattacaaacggctacctcattagcatccgcatattgtattatctcagtgcaaagattactacacttgatagttcctaaattttgttgattactctttttgttacacgcatccttataaagaatgaatggagtaccagtttcaatctgagattctataatcgctttccagacgactcgagcctttattatagatttgtatctcctttctctttcgtatagtgtatacaatcgttcgaactcgtctccccaaacattgtccaatccaggacattcatccggacacatcaacgaccactctccgtcatccttcactcgtttcataaagagatcaggaatccaaagagctataaatagatctctggttctatgttcctcgtttcctgtattctttttaagatcgaggaacgccataatatcagaatgccacggttccaagtatatggccataactccaggccgtttgtttcctccctgatctatgtatctagcggtgttattataaactctcaacattggaataataccgtttgatataccattggtaccggagatatagcttccactggcacgaatattactaattgatagacctattccccctgccattttagagattaatgcgcatcgttttaacgtgtcatagataccctctatgctatcatcgatcatgttaagtagaaaacagctagacatttggtgacgactagttcccgcattaaataaggtaggagaagcgtgcgtaaaccatttttcagaaagtagattgtacgtctcaatagctgagtctatatcccattgatgaattcctactgcgacacgcattaacatgtgctgaggtctttcaacgatcttgttgtttattttcaacaagtaggatttttccaaagttttaaaaccaaaatagttgtatgaaaagtctcgttcgtaaataataaccgagttgagtttatccttatatttgttaactatatccatggtgatacttgaaataatcggagaatgtttcccatttttaggattaacatagttgaataaatcctccatcacttcactaaatagtttttttgtttccttgtgtagatttgatacggctattctggcggctagaatggcataatccggatgttgtgtagtacaagtggctgctatttcggctgccagagtgtccaattctaccgttgttactccattatatattccttgaataaccttcatagctattttaataggatctatatgatccgtgtttaagccataacataattttctaatacgagacgtgattttatcaaacatgacattttccttgtatccatttcgtttaatgacaaacatttttgttggtgtaataaaaaaaattatttaacttttcattaatagggatttgacgtatgtagcgtacaaaattatcgttcctggtatatagataaagagtcctatatatttgaaaatcgttacggctcgattaaactttaatgattgcatagtgaatatatcattaggatttaactccttgactatcatggcggcgccagaaattaccatcaaaagcattaatacagttatgccgatcgcagttagaacggttatagcatccaccatttatatctaaaaattagatcaaagaatatgtgacaaagtcctagttgtatactgagaattgacgaaacaatgtttcttacatattttttttttattagtaaccgacttaatagtaggaactggaaaactagacttgattattctataagtatagatacccttccaaataatattctctttgataaaagttccagaaaatgtagaattttttaaaaagttatcttttgctattaccaagattgtgtttagacgcttattattaatatgagtgatgaaatccacaccgcctctagatatcgcttttatttccacattagatggtaaatccaatagtgaaactatctttttaggaatgtatggactcgcgtttagaggagtgaacgtcttaggcgtcggaaaggatgattcatcaaacgaataaacaatttcacaaatggatgttaatgtattagtaggaaattttttgacgctagtggaattgaagattctaatggatgatgttctacctatttcatccgataacatgttaatttccgacaccaacggttttaatatttcgatgatatacggtagtctctctttcggacttatatagcttattccacaatacgagtcattatatactccaaaaaacaaaataactagtataaaatctgtatcgaatgggaaaaacgaaattatcgacataggtatagaatctggaacattgaacgtattaatacttaattctttttctgtggtaagtaccgataggttattgacattgtatggttttaaatattctataacttgagacttgatagatattagtgatgaattgaaaattatttttatcaccacgtgtgtttcaggatcatcgtcgacgcccgtcaaccaaccgaatggagtaaaataaatatcattaatatatgctctagatattagtatttttatcaatcctttgattatcatcttctcgtaggcgaatgattccatgatcaagagtgatttaagaacatcctccggagtattaatgggcttagtaaacagtccatcgttgcaataataaaagttatccaagttaaaggatattatgcattcgtttaaagatatcacctcatctgacggagacaattttttggtaggttttagagactttgaagctacttgtttaacaaagttattcatcgtcgtttactattctatttaattttgtagttaatttatcacatatcacattaattgactttttggtccatttttccatacgtttatattcttttaatcctgcgttatccgtttccgttatatccagggatagatcttgcaagttaaatagaatgctcttaaataatgtcattttcttatccgctaaaaatttaaagaatgtataaacctttttcagagatttgaaactcttaggtggtgtcctagtacacaatatcataaacaaactaataaacattccacattcagattccaacagctgattaacttctacattaatacagcctattttcgctccaaatgtacattcgaaaaatctgaataaaacatcgatgtcacaatttgtattatccaatacagaatgtttgtgattcgtgttaaaaccatcggagaaggaataaaaataaaaattattatagtggtggaattcagttggaatattgcctccggagtcataaaaggatactaaacattgttttttatcataaattacacatttccaatgagacaaataacaaaatccaaacattacaaatctagaggtagaacttttaattttgtctttaagtatatacgataagatatgtttattcataaacgcgtcaaatttttcatgaatcgctaaggagtttaagaatctcatgtcaaattgtcctatataatccacttcggatccataagcaaactgagagactaagttcttaatacttcgattgctcatccaggctcctctctcaggctctattttcatcttgacgacctttggattttcaccagtatgtattcctttacgtgataaatcatcgattttcaaatccatttgtgagaagtctatcgccttagatactttttcccgtagtcgaggtttaaagaaatacgctaacggtatactagtaggtaactcaaagacatcatatatagaatggtaacgcgtctttaactcgtcggttaactctttcttttgatcgagttcgtcgctactattgggtctgctcaggtgccccgactctactagttccaacatcataccgataggaatacaagacactttgccggcggttgtagatttatcatatttctccactacatatccgttacaatttgttaaaaatttagatacatctatattgctacataatccagctagtgaatatatatgacataataaattggtaaatcctagttctggtattttactaattactaaatctgtatatctttccatttatcatggaaaagaatttaccagatatcttcttttttccaaactgcgttaatgtattctcttacaaatattcacaagatgaattcagtaatatgagtaaaacggaacgtgatagtttctcattggcggtgtttccagttataaaacatagatggcataacgcacacgttgtaaaacataaaggaatatacaaagttagtacagaagcacgtggaaaaaaagtatctcctccatcactaggaaaacccgcacacataaacctaaccgcgaagcaatatatatacagtgaacacacaataagctttgaatgttatagttttctaaaatgtataacaaatacagaaatcaattcgttcgatgagtatatattaagaggactattagaagctggtaatagtttacagatattttccaattccgtaggtaaacgaacagatactataggtgtactagggaataagtatccatttagcaaaattccattggcctcattaactcctaaagcacaacgagagatattttcagcgtggatttctcatagacctgtagttttaactggaggaactggagtgggtaagacgtcacaggtacccaagttattgctttggtttaattatttatttggtggattctctactctagataaaatcactgactttcacgaaagaccagtcattctatctcttcctaggatagctttagttagattgcatagcaataccattttaaaatcattgggatttaaggtactagatggatctcctatttctttacggtacggatctataccggaagaattaataaacaaacaaccaaaaaaatatggaattgtattttctacccataagttatctctaacaaaactatttagttatggcactcttattatagacgaagttcatgagcatgatcaaataggagatattattatagcagtagcgagaaagcatcatacgaaaatagattctatgtttttaatgactgccacgttagaggatgacagggaacggctaaaagtatttttacctaatcccgcatttatacatattcctggagatacactgtttaaaattagcgaggtatttattcataataagataaatccatcttccagaatggcatacatagaagaagaaaagagaaatttagttactgctatacagatgtatactcctcctgatggatcatccggtatagtctttgtggcatccgttgcacagtgtcacgaatataaatcatatttagaaaaaagattaccgtatgatatgtatattattcatggtaaggtcttagatatagacgaaatattagaaaaagtgtattcatcacctaatgtatcgataattatttctactccttatttggaatccagcgttactatacgcaatgttacacacatttatgatatgggtagagtttttgtccccgctccttttggaggatcgcaagaatttatttctaaatctatgagagatcaacgaaaaggaagagtaggaagagttaatcctgggacatacgtatatttctatgatctgtcttatatgaagtctatacagcgaatagattcagaatttctacataattatatattgtacgctaataagtttaatctaacactccccgaagatttgtttataatccctacaaatttggatattctatggcgtacaaaggaatatatagactcgttcgatattagtacagaaacatggaataaattattatccaattattatatgaagatgatagagtatgctaaactttatgtactaagtcctattctcgctgaggagttggataattttgagaggacgggagaattaactagtattgtacaagaagccattttatctctaaatttacgaattaagattttaaattttaaacataaagatgatgatacgtatatacacttttgtaaaatattattcggtgtctataacggaacaaacgctactatatattatcatagacctctaacgggatatatgaatatgatttcagatactatatttgttcctgtagataataactaaaaatcaaactctaatgaccacatctttttttagagatgaaaaattttccacatctccttttgtagacacgactaaacattttgcagaaaaaagtttattagtgtttagataatcgtatacttcatcagtgtagatagtaaatgtgaacagataaaaggtattcttgctcaatagattggtaaattccatagaatatattaatcctttcttcttgagatcccacatcatttcaaccagagacgttttatccaatgatttacctcgtactataccacatacaaaactagattttgcagtgacgtcgtatctggtattcctaccaaacaaaattttacttttagttcttttagaaaattctaaggtagaatctctatttgccaatatgtcatctatggaattaccactagcaaaaaatgatagaaatatatattgatacatcgcagctggttttgatctactatactttaaaaacgaatcagattccataattgcctgtatatcatcagctgaaaaactatgttttacacgtattccttcggcatttctttttaatgatatatcttgtttagacaatgataaagttatcatgtccatgagagacgcgtctccgtatcgtataaatatttcattagatgttagacgcttcattaggggtatacttctataaggtttcttaatcagtccatcattggttgcgtcaagaactactatcggatgttgttgggtatctctagtgttacacatggccttactaaagtttgggtaaataactatgatatctctattaattatagatgcatatatttcatttgtcaaggatattagtatcgacttgctatcgtcattaatacgtgtaatgtaatcatataaatcatgcgatagccaaggaaaatttaaatagatgttcatcatataatcgtcgctataattcatattaatacgttgacattgactaatttgtaatatagcctcgccacgaagaaagctctcgtattcagtttcatcgataaaggataccgttaaatataactggttgccgatagtctcatagtctattaagtggtaagtttcgtacaaatacagaatccctaaaatattatctaatgttggattaatctttaccataactgtataaaatggagacggagtcataactattttaccgtttgtacttactggaatagacgaaggaataatctccggacatgctggtaaagacccaaatgtctgtttgaagaaatccaatgttccaggtcctaatctcttaacaaaaattacgatattcgatcccgatatcctttgcattctatttaccagcatatcacgaactatattaagattatctatcatgtctattctcccaccgttatataaatcgcctccgctaagaaacgttagtatatccatacaatggaatacttcatttctaaaatagtattcgttttctaattctttaatgtgaaatcgtatactagaaagggaaaaattatctttgagttttccgttagaaaagaaccacgaaactaatgttctgattgcgtccgattccgttgctgaattaatggatttacaccaaaaactcatataacttctagatgtagaagcattcgctaaaaaattagtagaatcaaaggatataagtagatgttccaacaagtgagcaattcccaagatttcatctatatcattctcgaatccgaaattagaaattcccaagtagatatcctttttcatccgatcgttgatgaaaatacgaactttattcggtaagacaatcatttactaaggagtaaaataggaagtaatgttcgtatgtcgttatcatcgtataaattaaaggtgtgttttttaccattaagtgacattataattttaccaatattggaattataatataggtgtatttgcgcactcgcgacggttgatgcatcggtaaatatagctgtatctaatgttctagtcggtatttcatcatttcgctgtctaataatagcgttttctctatctgtttccattacagctgcctgaagtttattggtcggataatatgtaaaataataagaaatacatacgaataacaaaaataaaataagatataataaagatgccatttagagatctaattttgtttaacttgtccaaattcctacttacagaagatgaggaatcgttggagatagtgtcttccttatgtagaggatttgaaatatcttatgatgacttgataacttactttccagataggaaataccataaatatatttctaaagtatttgaacatgtagatttatcggaggaattaagtatggaattccatgatacaactctgagagatttagtctatcttagattgtacaagtattccaagtgtatacggccgtgttataaattaggagataatctaaaaggcatagttgttataaaggacaggaatatttatattagagaagcaaatgatgacttgatagaatatctcctcaaggaatacactcctcagatttatacatattctaatgagcgcgtccccataactggttcaaaattaattctttgtggattttctcaagttacatttatggcgtatacaacgtcgcatataacaacaaataaaaaggtagatgttctcgtttccaaaaaatgtatagatgaactagtcgatccaataaattatcaaatacttcaaaatttatttgataaaggaagcggaacaataaacaaaatactcaggaagatattttattcggtaaccggtggccaaactccataatttgctttttctatttcggattttagaatttccaaattcaccagcgatttatcggttttggtgaaatccaaggatttattaatgtccacaaatgccatttgttttgtctgtggattgtatttgaaaatggaaacgatgtagttagatagatgcgctgcaaagtttcctattagggttccgcgctttacgtcacccagcatacttgaatcaccatcctttaaaaaaaatgataagatatcaacatggagtatatcatactcggattttaattcttctactgcatcactgacattttcacaaatactacaatacggtttaccgaaaataatcagtacgttcttcatttatgggtatcaaaaacttaaaatcgttactgctggaaaataaatcactgacgatattagatgataatttatacaaagtatacaatggaatatttgtggatacaatgagtatttatatagccgtcgccaattgtgtcagaaacttagaagagttaactacggtattcataaaatacgtaaacggatgggtaaaaaagggagggcatgtaaccctttttatcgatagaggaagtataaaaattaaacaagacgttagagacaagagacgtaaatattctaaattaaccaaggacagaaaaatgctagaattagaaaagtgtacatccgaaatacaaaatgttaccggatttatggaagaagaaataaaggcagaaatgcaattaaaaatcgataaactcacatttcaaatatatttatctgattctgataacataaaaatatcattgaatgagatactaacacatttcaacaataatgagaatgttacattattttattgtgatgaacgagacgcagaattcgttatgtgtctcgaggctaaaacacatttctctaccacaggagaatggccgttgataataagtaccgatcaggatactatgctatttgcatctactgataatcatcctaagatgataaaaaacttaactcaactgtttaaatttgttccctcggcagaggataactatttagcaaaattaacggcgttagtgaatggatgtgatttctttcctggactctatggggcatctataacacccaccaacttaaacaaaatacaattgtttagtgattttacaatcgataatatagtcactagtttggcaattaaaaattattatagaaagactaactctaccgtagacgtgcgtaatattgttacgtttataaacgattacgctaatttagacgatgtctactcgtatgttcctccttgtcaatgcactgttcaagaatttatattttccgcattagatgaaaaatggaacaattttaaatcatcttatttagagaccgttccgttaccctgccaattaatgtatgcattagaaccacgcaaggagattgatgtttcagaagttaaaactttatcatcttatatagatttcgaaaatactaaatcagatatcgatgttataaaatctatatcttcgatcttcggatattctaacgaaaactgtaacactatagtgttcggcatctataaggataatttactactgagtataaatagttcattttactttaacgatagtctgttaataaccaatactaaaagtgataatataataaatataggttactagattaaaaatggtgttccaactcgtgtgctctacgtgcggcaaagatatttctcacgaacgatataaattgattatacgaaaaaaatcattaaaggatgtactcgtcagtgtaaagaacgaatgttgtaggttaaaattatctacacaaatagaacctcaacgtaacttaacagtgcaacctctattggatataaactaatatggatccggttaattttatcaagacatatgcgcctagaggttctattatttttattaattataccatgtcattaacaagtcatttgaatccatcgatagaaaaacatgtgggtatttattatggtacgttattatcggaacacttggtagttgaatctacctatagaaaaggagttcgaatagtcccattggatagtttttttgaaggatatcttagtgcaaaagtatacatgttagagaatattcaagttatgaaaatagcagctgatacgtcattaactttattgggtattccgtatggatttggtcataatagaatgtattgttttaaattggtagctgaatgttataaaaatgccggtattgatacatcgtctaaacgaatattaggtaaagatatttttctgagccaaaacttcacagatgataatagatggataaagatatatgattctaataatttaacattttggcaaattgattaccttaaagggtgagttaatatgcataactactcctccgttgttttttccctcgttctttttcttaacgttgtttgccatcactctcataatgtaaagatattctaaaatggtaaacttttgcatatcggacgcagaaattggtataaatgttgtaattgtattatttcccgtcaatggactagtcacagctccatcagttttatatcctttagagtatttctcactcgtgtctaacattctagagcattccatgatctgtttatcgttgatattggccggaaagatagattttttattttttattatattactattggcaattgtagatataacttctggtaaatatttttctaccttttcaatctcttctattttcaagccggctatatattctgctatattgttgctagtatcaataccttttctggctaagaagtcatatgtggtattcactatatcagttttaactggtagttccattagcctttccacttctgcagaataatcagaaattggttctttaccagaaaatccagctactataataggctcaccgatgatcattggcaaaatcctatattgtaccagattaatgagagcatatttcatttccaataattctgctagttcttgagacattgatttatttgatgaatctagttggttctctagatactctaccatttctgccgcatacaataacttgttagataaaatcagggttatcaaagtgtttagcgtggctagaatagtgggcttgcatgtattaaagaatgcggtagtatgagtaaaccgttttaacgaattatatagtctccagaaatctgtggcgttacatacatgagccgaatgacatcgaagattgtccaatatttttaatagctgctctttgtccattatttctatatttgactcgcaacaattgtagataccattaatcactgattcctttttcgatgccggacaatagcacaattgtttagctttggactctatgtattcagaattaatagatatatctctcaatacagattgcactatacattttgaaactatgtcaaaaattgtagaacgacgctgttctgcagccatttaactttaaataatttacaaaaatttaaaatgagcatccgtataaaaatcgataaactgcgccaaattgtggcatatttttcagagttcagtgaagaagtatctataaatgtagactcgacggatgagttaatgtatatttttgccgccttgggcggatctgtaaacatttgggccattatacctctcagtgcatcagtgttctaccgcggagccgaaaacattgtgtttaatcttcctgtgtccaaggtaaaatcgtgtttgtgtagttttcacaatgatgccatcatagatatagaacctgatctggaaaataatctagtaaaactttctagttatcatgtagtaagtgtcgattgtaacaaggaactgatgcctattaggacagatactactatttgtctaagtatagatcaaaagaaatcttacgtgtttaattttcacaagtatgaagaaaaatgttgtggtagaaccgtcattcatttagaatggttgttgggctttatcaagtgtattagtcagcatcagcatttggctattatgtttaaagatgacaatattattatgaagactcctggtaatactgatgcgttttccagggaatattctatgactgaatgttctcaagaactacaaaagttttctttcaaaatagctatctcgtctctcaacaaactacgaggattcaaaaagagagtcaatgtttttgaaactagaatcgtaatggataatgacgataacattctaggaatgttgttttcggatagagttcaatcctttaagatcaacatctttatgacgtttttagattaatactttcaatgagataaatatgggtggcagagtaagtgttgagctccctaaacgggatccgcctccgggagtacccactgatgagatgttattaaacgtggataaaatgcatgacgtgatagctcccgctaagcttttagaatatgtgcatataggaccactagcaaaagataaagaggataaagtaaagaaaagatatccagagtttagattagtcaacacaggacccggtggtctttcggcattgttaagacaatcgtataatggaaccgcacccaattgctgtcgcacttttaatcgtactcattattggaaaaaggatggaaagatatcagataagtatgaagagggtgcagtattagaatcgtgttggccagacgttcacgacactggaaaatgcgatgttgatttattcgactggtgtcagggggatacgttcgatagaaacatatgccatcagtggatcggttcagcctttaataggagtgatagaactgtagagggtcaacaatcgttaataaatctgtataataagatgcaaacattatgtagtaaagatgctagtgtaccaatatgtgaatcatttttgcatcatttacgcgcacacaatacagaagatagcaaagagatgatcgattatattctaagacaacagtctgcggactttaaacagaaatatatgagatgtagttatcccactagagataagttagaagagtcattaaaatatgcggaacctcgagaatgttgggatccagagtgttcgaatgccaatgttaatttcttactaacacgtaattataataatttaggactttgcaatattgtacgatgtaatactagcgtgaacaacttacagatggataaaacttcctcattaagattgtcatgtggattaagcaatagtgatagattttctactgttcccgtcaatagagcaaaagtagttcaacataatattaaacattcgttcgacctaaaattgcatttgatcagtttattatctctcttggtaatatggatactaattgtagctatttaaatgggtgccgcggcaagcatacagacgacggtgaatacactcagcgaacgtatctcgtctaaattagaacaagaagcgaacgctagtgctcaaacaaaatgtgatatagaaatcggaaatttttatatccgacaaaaccatggatgtaacctcactgttaaaaatatgtgctctgcggacgcggatgctcagttggatgctgtgttatcagccgctacagaaacatatagtggattaacaccggaacaaaaagcatacgtaccagctatgtttactgctgcgttaaacattcagacgagtgtaaacactgttgttagagattttgaaaattatgtgaaacagacttgtaattctagcgcggtcgtcgataacaaattaaagatacaaaacgtaatcatagatgaatgttacggagccccaggatctccaacaaatttggaatttattaatacaggatctagcaaaggaaattgtgccattaaagcgttgatgcaattgacgactaaggccactactcaaatagcacctagacaagttgctggtacaggagttcagttttatatgattgttatcggtgttataatattggcagcgttgtttatgtactatgccaagcgtatgttgttcacatccaccaatgataaaatcaaacttattttagccaataaggaaaacgtccattggactacttacatggacacattctttagaacttctccgatggttattgctaccacggatatgcaaaactgaaaatatattgataatattttaatagattaacatggaagttatcgctgatcgtctagacgatatagtgaaacaaaatatagcggatgaaaaatttgtagattttgttatacacggtctagagcatcaatgtcctgctatacttcgaccattaattaggttgtttattgatatactattatttgttatagtaatttatatttttacggtacgtctagtaagtagaaattatcaaatgttgttggcgttggtggcgctagtcatcacattaactattttttattactttatactataatagtactagactgacttctaacaaacatctcacctgccataaataaatgcttgatattaaagtcttctatttctaacactattccatctgtggaaaataatactctgacattatcgctaattgacacatcggtgagtgatatgcctataaagtaataatcttctttgggcacatataccagtgtaccaggttctaacaacctatttactggtgctcctgtagcatactttttctttaccttgagaatatccatcgtttgcttggtcaatagcgatatgtgattttttatcaaccactcaaaaaagtaattggagtgttcatatcctctacgggctattgtctcatggccgtgtatgaaatttaagtaacacgactgtggtagatttgttctatagagccggttgccgcaaatagatagaactaccaatatgtctgtacaaatgttaaacattaattgattaacagaaaaaacaatgttcgttctgggaatagaaaccagatcaaaacaaaattcgttagaatatatgccacgtttatacatggaatataaaataactacagtttgaaaaataacagtatcatttaaacatttaacttgcggggttaatttcacaactttactgtttttaaactgttcaaaatatagcatcgatccatgagaaatacgtttagccgcctttaatagaggaaatcccaccgcctttctggatctcaccaacgacgatagttctgaccagcaacttatttcttcatcatccacctgttttaacatataataggcaggagatagatatccgtcattgcaatattccttttcgtaggcacacaatctaatattgataaaatctccattctcttctctgcatttattatcttgtttcggtggctgattaggctgtagtcttggtttaggctttggtatatcgttgttgaatctattttggtcattaaatctttcatttcttcctggtatatttctatcacctcgtttggttggatttttgtctatattatcgtttgtaacatcggtacgggtattcatttatcacaaaaaaaacttctctaaatgagtctactgctagaaaacctcatcgaagaagataccatattttttgcaggaagtatatctgagtatgatgatttacaaatggttattgccggcgcaaaatccaaatttccaagatctatgctttctatttttaatatagtacctagaacgatgtcaaaatatgagttggagttgattcataacgagaatatcacaggggcaatgtttaccacaatgtataatataagaaacaatttgggtctaggagatgataaactaactattgaagccattgaaaactatttcttggatcctaacaatgaggttatgcctcttatcattaataatacggatatgactgccgtcattcctaaaaaaagtggtaggagaaagaataagaacatggttattttccgtcaaggatcatcacctatcttgtgtattttcgaaactcgtaaaaagattaatatttataaagaaaatatggaatccgcgtcgactgagtatacacctatcggagacaacaaggctttgatatctaaatatgcgggaattaatgtcctgaatgtgtattctccttccacatccatgagattgaatgccatttacggattcaccaataaaaataaactagagaaacttagtactaataaggaactagaatcgtatagttctagccctcttcaagaacccattaggttaaatgattttctgggactattggaatgtgttaaaaagaatattcctctaacagatattccgacaaaggattgattactataaatggagaatgttcctaatgtatactttaatcctgtgtttatagagcccacgtttaaacattctttattaagtgtttataaacacagattaatagttttatttgaagtattcattgtattcattctaatatatgtattttttagatctgaattaaatatgttcttcatgcctaaacgaaaaatacccgatcctattgatagattacgacgtgctaatctagcgtgtgaagacgataaattaatgatctatggattaccatggatgacaactcaaacatctgcgttatcaataaatagtaaaccgatagtgtataaagattgtgcaaagcttttgcgatcaataaatggatcacaaccagtatctcttaacgatgttcttcgcagatgatgattcattttttaagtatttggctagtcaagatgatgaatcttcattatctgatatattgcaaatcactcaatatctagactttctgttattattattgatccaatcaaaaaataaattagaagccgtgggtcattgttatgaatctctttcagaggaatacagacaattgacaaaattcacagactttcaagattttaaaaaactgtttaacaaggtccctattgttacagatggaagggtcaaacttaataaaggatatttgttcgactttgtgattagtttgatgcgattcaaaaaagaatcctctctagctaccaccgcaatagatcctattagatacatagatcctcgtcgcgatatcgcattttctaacgtgatggatatattaaagtcgaataaagtgaacaataattaattctttattgtcatcatgaacggcggacatattcagttgataatcggccccatgttttcaggtaaaagtacagaattaattagacgagttagacgttatcaaatagctcaatataaatgcgtgactataaaatattctaacgataatagatacggaacgggactatggacgcatgataagaataattttgaagcattggaagcaactaaactatgtgatgtcttggaatcaattacagatttctccgtgataggtatcgatgaaggacagttctttccagacattgttgaattctgtgagcgtatggcaaacgaaggaaaaatagttatagtagccgcactcgatgggacatttcaacgtaaaccgtttaataatattttgaatcttattccattatctgaaatggtggtaaaactaactgctgtgtgtatgaaatgctttaaggaggcttccttttctaaacgattgggtgaggaaaccgagatagagataataggaggtaatgatatgtatcaatcggtgtgtagaaagtgttacgtcggctcataatattatattttttatctaaaaaactaaaaataaacattgattaaattttaatataatacttaaaaatggatgttgtgtcgttagataaaccgtttatgtattttgaggaaattgataatgagttagattacgaaccagaaagtgcaaatgaggtcgcaaaaaaactgccgtatcaaggacagttaaaactattactaggagaattattttttcttagtaagttacagcgacacggtatattagatggtgccaccgtagtgtatataggatctgctcccggtacacatatacgttatttgagagatcatttctataatttaggagtgatcatcaaatggatgctaattgacggccgccatcatgatcctattttaaatggattgcgtgatgtgactctagtgactcggttcgttgatgaggaatatctacgatccatcaaaaaacaactgcatccttctaagattattttaatttctgatgtgagatccaaacgaggaggaaatgaacctagtacggcggatttactaagtaattacgctctacaaaatgtcatgattagtattttaaaccccgtggcgtctagtcttaaatggagatgcccgtttccagatcaatggatcaaggacttttatatcccacacggtaataaaatgttacaaccttttgctccttcatattcagctgaaatgagattattaagtatttataccggtgagaacatgagactgactcgagttaccaaatcagacgctgtaaattatgaaaaaaagatgtactaccttaataagatcgtccgtaacaaagtagttgttaactttgattatcctaatcaggaatatgactattttcacatgtactttatgctgaggaccgtgtactgcaataaaacatttcctactactaaagcaaaggtactatttctacaacaatctatatttcgtttcttaaatattccaacaacatcaactgaaaaagttagtcatgaaccaatacaacgtaaaatatctagcaaaaattctatgtctaaaaacagaaatagcaagagatccgtacgcagtaataaatagaaacgtactactgagatatactaccgatatagagtataatgatttagttactttaataaccgttagacataaaattgattctatgaaaactgtgtttcaggtatttaacgaatcatccataaattatactccggttgatgatgattatggagaaccaatcattataacatcgtatcttcaaaaaggtcataacaagtttcctgtaaattttctatacatagatgtggtaatatctgacttatttcctagctttgttagactagatactacagaaactaatatagttaatagtgtactacaaacaggcgatggtaaaaagactcttcgtcttcccaaaatgttagagacggaaatagttgtcaagattctctaccgtcctaatataccattaaaaattgttagatttttccgcaataacatggtaactggagtagagatagccgatagatctgttatttcagtcgctgattaatcaattagtagagatgagataagaacattataataatcaataatatattttatatcttatatcttgtttagaaaaatgctaatattaaaatagctaacgctagtaatccaatcggaagccatttgatatctataatagggtatctaatttcctgattcagatagcggacagctatattctcggtagctactcgtttggaatcacaaacattatttacatctaatttactatctgtaatggaaacgtttcccaatgaaatggtacaatccgatacattgcattttgttatatttttttttaaagaggctggtaacaacgcatcgcttcgtttacatggctcgtaccaacaataatagggtaatcttgtatctattcctatccgtactatgcttttatcaggataaatacatttacatcgtatatcgtctttgttagcatcacagaatgcataaatttgttcgtccgtcatgataaaaatttaaagtgtaaatataactattattttatagttgtaataaaaagggaaatttgattgtatactttcggttctttaaaagaaactgacttgataaaaatggctgtaatctctaaggttacgtatagtctatatgatcaaaaagagattaatgctacagatattatcattagtcatgttaaaaatgacgacgatatcggtaccgttaaagatggtagactaggtgctatggatggggcattatgtaaaacttgtgggaaaacggaattggaatgtttcggtcactggggtaaagtaagtatttataaaactcatatagttaagcctgaatttatttcagaaattattcgtttactgaattatatatgtattcactgcggattattgcgttcacgagaaccgtattccgacgatattaacctaaaagagttatcgggacacgctcttaggagattaaaggataaaatattatccaagaaaaagtcatgttggaacagtgaatgtatgcaaccgtatcaaaaaattactttttcaaagaaaaaggtttgtttcgtcaacaagttggatgatattaacgttcctaattctctcatctatcaaaagttaatttctattcatgaaaagttttggccattattagaaattcatcaatatccagctaacttattttatacagactactttcccatccctccgttgattattagaccggctattagtttttggatagatagtatacccaaagaaaccaatgaattaacttacttattaggtatgatcgttaagaattgtaacttgaatgctgatgaacaggttatccagaaggcggtaatagaatacgatgatattaaaattatttctaataacacttccagtatcaatttatcatatatcacatccggcaaaaataatatgattagaagttatatcgtcgcccggcgaaaagatcagaccgctagatctgtaattggtcccagtacatctatcaccgttaatgaggtaggaatgcccgcatatattagaaatacacttacagaaaagatatttgttaatgcctttacagtggataaagttaaacaactattagcgtcaaaccaagttaaattttactttaataaacgattaaaccaattaacaagaatacgccaaggaaagtttatcaaaaataaaatacatttattgcctggtgattgggtagaagtagctgttcaagaatatacaagtattatttttggaagacagccgtctctacatagatacaacgtcatcgcttcatctatcagagctaccgaaggagatactatcaaaatatctcccggaattgtcaactctcaaaatgctgatttcgacggagatgaagaatggatgatattggagcaaaatcctaaagccgtaattgaacaaagtattcttatgtatccgacgacgttactcaaacacgatattcatggagcccccgtttatggatctattcaagatgaaatcgtagcagcgtattcattgtttaggatacaagatctttgtttagatgaagtattgaacatcttggggaaatatggaagagagttcgatcctaaaggtaaatgtaaattcagcggtaaagatatctatacttacttgataggtgaaaagattaattatccgggtctcttaaaggatggtgaaattattgcaaacgacgtagatagtaattttgttgtggctatgaggcatctgtcattggctggactcttatccgatcataagtcgaacgtggaaggtatcaactttattatcaagtcatcttatgtttttaagagatatctatctatttacggttttggggtgacattcaaagatctgagaccaaattcgacgttcactaataaattggaggccatcaacgtagaaaaaatagaacttatcaaagaagcatacgccaaatatctcaacgatgtaagagacgggaaaatagttccattatctaaagctttagaggcggactatgtggaatccatgttatccaacttgacaaatcttaatatccgagagatagaagaacatatgagacaaacgctgatagatgatccagataataacctcctgaaaatggccaaagcgggttataaagtaaatcccacagaactaatgtatattctaggtacttatggacaacagaggattgatggtgaaccagcagagactcgagtattgggtagagtcttaccttactatcttccagactctaaggatccagaaggaagaggttacattcttaattctttaacaaaaggattaacgggttctcaatattacttttcgatgctggttgcaagatctcaatctactgatatcgtctgtgaaacatcacgtaccggaacactggctagaaaaatcattaaaaagatggaggatatggtggtcgacggatacggacaagtagttataggtaatacgctcatcaagtacgccgccaattataccaaaattctaggctcagtatgtaaacctgtagatcttatctatccagatgagtccatgacttggtatttggaaattagtgctctgtggaataaaataaaacagggattcgtttactctcagaaacagaaacttgcaaaaaagacattggcgccgtttaatttcctagtattcgtcaaacccaccactgaggataatgctattaaggttaaggatctgtacgatatgattcataacgtcattgatgatgtgagagagaaatacttctttacggtatctaatatagattttatggagtatatattcttgacgcatcttaatccttctagaattagaattacaaaagaaacggctatcactatctttgaaaagttctatgaaaaactcaattatactctaggtggtggaactcctattggaattatttctgcacaggtattgtctgagaagtttacacaacaagccctgtccagttttcacactactgaaaaaagtggtgccgtcaaacaaaaacttggtttcaacgagtttaataacttgactaatttgagtaagaataagaccgaaattatcactctggtatccgatgatatctctaaacttcaatctgttaagattaatttcgaatttgtatgtttgggagaattaaatccaaacatcactcttcgaaaagaaacagataggtatgtagtagatataatagtcaatagattatacatcaagagagcagaaattaccgaattagtcgtcgaatatatgattgaacgattcatctcctttagcgtcattgtaaaggaatggggtatggaaacattcattgaggatgaggataatattagatttactgtctacctaaatttcgttgaaccggaagaattgaatcttagtaagtttatgatggttcttccgggtgccgccaacaagggcaagattagtaaattcaagattcctatctctgattatacgggatatgacgacttcaatcaaacaaaaaagctcaataagatgactgtagaactcatgaatctaaaagaattgggttctttcgatttggaaaacgtcaacgtgtatcctggagtatggaatacatacgatatcttcggtatcgaggccgctcgtgaatacttgtgcgaagccatgttaaacacctatggagaagggttcgattatctgtatcagccttgtgatcttctcgctagtttactatgtgctagttacgaaccagaatcagtgaataaattcaagttcggcgcagctagtactcttaagagagctacgttcggagacaataaagcattgttaaacgcggctcttcataaaaagtcagaacctattaacgataatagtagctgccacttttttagcaaggtccctaatataggaactggatattacaaatactttatcgacttgggtcttctcatgagaatggaaaggaaactatctgataagatatcttctcaaaagatcaaggaaatggaagaaacagaagacttttaattcttatcaataacatatttttctatgatctgtcttttaaacgatggattttccacaaatgcgcctctcaagtccctcatagaatgatacacgtataaaaaatatagcataggcaatgactccttatttttagacattagatatgccaaaatcatagccccgcttctatttactcccgcagcacaatgaaccaacacgggctcgtttcgttgatcacatttagataaaaaggcggttacgtcgtcaaaatatttactaatatcggtagttgtatcatctaccaacggtatatgaataatattaatattagagttaggtaatgtatatttatccatcgtcaaatttaaaacatatttgaacttaacttcagatgatggtgcatccatagcatttttataatttcccaaatacacattattggttactcttgtcattatagtgggagatttggctttgtgcatatctccagttgaacgtagtagtaagtatttatacaaacttttcttatccatttataacgtacaaatggataaaactactttatcggtaaacgcgtgtaatttagaatacgttagagaaaaggctatagtaggcgtacaagcagccaaaacatcaacacttatattctttgttattatattggcaattagtgcgctattactctggtttcagacgtctgataatccagtctttaatgaattaacgagatatatgcgaattaaaaatacggttaacgattggaaatcattaacggatagcaaaacaaaattagaaagtgatagaggtagacttctagccgctggtaaggatgatatattcgaattcaaatgtgtggatttcggcgcctattttatagctatgcgattggataagaaaacatatctgccgcaagctattaggcgaggtactggagacgcgtggatggttaaaaaggcggcaaaggtcgatccatctgctcaacaattttgtcagtatttgataaaacacaagtctaataatgttattacttgtggtaatgagatgttaaatgaattaggttatagcggttattttatgtcaccgcattggtgttccgattttagtaatatggaatagtgttagataaatgcggtaacgaatgttcctgtaaggaaccataacagcttagatttaacgttaaagatgagcataaacataataaacaaaattacaatcaaacctataacattaatatcaaacaatccaaaaaatgaaatcagtggagtagtaaacgcgtacataactcctggataacgtttagcagctgccgttcctattctagaccaaaaattcggtttcatgttttcgaaacggtattctgcaacaagtcgaggatcgtgttctacatatttggcggcgttatccagtatctgcctattgatcttcatttcgttttcgattctggctatttcaaaataaaatcccgatgatagacctccagactttataatttcatctacgatgttcagcgccgtagtaactctaataatataggctgataagctaacatcataccctcctgtatatgtgaatatggcatgatttttgtccattacaagctcggttttaactttattgcctgtaataatttctctcatctgtaggatatctatttttttgtcatgcattgccttcaagacgggacgaagaaacgtaatatcctcaataacgttatcgttttctacaataactacatattctacctttttattttctaactcggtaaaaaaattagaatcccatagggctaaatgtctagcgatatttcttttcgtttcctctgtacacatagtgttacaaaaccctgaaaagaagtgagtatacttgtcatcatttctaatgtttcctccagtccactgtataaacgcataatccttgtaatgatctggatcatccttgactaccacaacatttcttttttctggcataacttcattgtcctttacatcatcgaacttctgatcattaatatgctcatgaacattaggaaatgtttctgatggaggtctatcaataactggcacaacaataacaggagttttcaccgccgccatttagttattgaaattaatcatatacaactctttaatacgagttatattttcgtctatccattgtttcacatttacatatttcgacaaaaagatataaaatgcgtattccaatgcttctctgtttaatgaattactaaaatatacaaacacgtcactgtctggcaataaatgatatcttagaatattgtaacaatttattttgtattgcacatgttcgtgatctatgagttcttcttcgaatggcataggatctccgaatctgaaaacgtataaataggagttagaataataatatttgagagtattggtaatatataaactctttagcggtataattagtttttttctctcgatttctatttttagatgtgatggaaaaatgactaattttgtagcattagtatcatgaactctaatcgagatcttaatatcttcgtcacacgttagttctttgaagtttttaagagatgcatcagttggttcgaccgatggagtaggtgcaacaattttttgttcgatgtatgtatgtactggagccattgtcttaactataatggtgcttgtatcgaaaaactttaatgcagataatggaagctcttcgccgcgactttctacatcgtaattgggttctaacgccgatctctgaatggatactagttttctaagttctaatgtgattctctgaaaatgtaaatccaattcctccggcattatagatgtgtatacatcggtaaataaaactatagtatccaacgatcccttctcgcaaattctagtcttaaccaaaaaatcgtatataaccacggagatggcgtatttaagagtggattcttctaccgttttgttcttggatttcatataagaaactataaagtccgcactactgttaagaatgattactaacgcaactatatagtttaaattaagcatcttggaaacataaaataactctgtagacgatacttgactttcgaataagtttgcagacaaacgaagaaagaacagacctctcttaatttcagaagaaaactttttttcgtattcctgacgtctagagtttatatcaataagaaagttaagaattagtcggttaatgttgtatttcattacccaagtttgagatttcataatattatcaaaagacatgataatattaaagataaagcgctgactatgaacgaaatagctatatggttcgctcaagaatatagtcttgttaaacgtggaaacgataactgtatttttaatcacgtcagcggcatctaaattaaatataggtatatttattccacacactctacaatatgccacaccatcttcataataaataaattcgttagcaaaattattaattttagtgaaatagttagcgtcaactttcatagcttccttcaatctaatttgatgctcacacggtgcgaattccactctaacatcccttttccatgcctcaggttcatcgatctctataatatctagttttttgcgtttcacaaacacaggctcgtctctcgcgatgagatctgtatagtaactatgtaaatgataactagatagaaagatgtagctatatagatgacgatcctttaagagaggtatgatgactttaccccaatcagatagactgttgttatggtcttcggaaaaagaatttttataaatttttccagtattttccaaatatacgtacttaacatctaaaaaatccttaatgataataggaatggataatccgtctattttataaagaaatacatatcgcacattatacttttttttggaaatgggaataccgatgtgtctacataaatatgcaaagtctaaatattttttagagaatcttagttggtccaaattcttttccaagtacggtaatagatttttcatattgaacggtatcttcttaatctctggttctagttccgcattaaatgatgaaactaagtcactatttttataactaacgattacatcacctctaacatcatcatttaccagaatactgatcttcttttgtcgtaaatacatgtctaatgtgttaaaaaaaagatcatacaagttatacgtcatttcatctgtggtattcttgtcattgaaggataaactcgtactaatctcttctttaacagcctgttcaaatttatatcctatatacgaaaaaatagcaaccagtgtttgatcatccgcgtcaatattctgttctatcgtagtgtataacaatcgtatatcttcttctgtgatagtcgatacgttataaaggttgataacgaaaatatttttatttcgtgagataaagtcatcgtaggattttggacttatattcgcgtctagtagatatgcttttatttttggaatgatctcaattagaatagtctctttagagtccatttaaagttacaaacaactaggaaattggtttatgatgtataatttttttagtttttatagattctttattctatacttaaaaaatgaaaataaatacaaaggttcttgagggttgtgttaaattgaaagcgagaaataatcataaattatttcattatcgcgatatccgttaagtttgtatcgtaatggcgtggtcaattacaaataaagcggatactagtagcttcacaaagatggctgaaatcagagctcatctaaaaaatagcgctgaaaataaagataaaaacgaggatattttcccggaagatgtaataattccatctactaagcccaaaaccaaacgagccactactcctcgtaaaccagcggctactaaaagatcaaccaaaaaggaggaagtggaagaagaagtagttatagaggaatatcatcaaacaactgaaaaaaattctccatctcctggagtcagcgacattgtagaaagcgtggctgctgtagagctcgatgatagcgacggggatgatgaacctatggtacaagttgaagctggtaaagtaaatcatagtgctagaagcgatctttctgacctaaaggtggctaccgacaatatcgttaaagatcttaagaaaattattactagaatctctgcagtatcgacggttctagaggatgttcaagcagctggtatctctagacaatttacttctatgactaaagctattacaacactatctgatctagtcaccgagggaaaatctaaagttgttcgtaaaaaagttaaaacttgtaagaagtaaatgcgtgcacttttttataaagatggtaaactctttaccgataataattttttaaatcctgtatcagacgataatccagcgtatgaggttttgcaacatgttaaaattcctactcatttaacagatgtagtagtatatgaacaaacgtgggaggaggcgttaactagattaatttttgtgggaagtgattcaaaaggacgtagacaatacttttacggaaaaatgcatgtacagaatcgcaacgctaaaagagatcgtatttttgttagagtatataacgttatgaaacgaattaattgttttataaacaaaaatataaagaaatcgtccacagattccaattatcagttggcggtttttatgttaatggaaactatgttttttattagatttggtaaaatgaaatatcttaaggagaatgaaacagtagggttattaacactaaaaaataaacacatagaaataagtcccgatgaaatagttatcaagtttgtaggaaaggacaaagtttcacatgaatttgttgttcataagtctaatagactatataaaccgctattgaaactgacggatgattctagtcccgaagaatttctgttcaacaaactaagtgaacgaaaggtatacgaatgtatcaaacagtttggtattagaatcaaggatctccgaacgtatggagtcaattatacgtttttatataatttttggacaaatgtaaagtccatatctcctcttccgtcaccaaaaaagttaatagcgttaactatcaaacaaactgctgaagtggtaggtcatactccatcaatttcaaaaagagcttatatggcaacgactattttagaaatggtaaaggataaaaattttttagatgtagtatctaaaactacgttcgatgaattcctatctatagtcgtagatcacgttaaatcatctacggatggatgatatagatctttacacaaataattacaagaccgataaatggaaatggataagcgtatgaaatctctcgcaatgacagctttcttcggagagctaaacacattagatattatggcattgataatgtctatatttaaacgccatccaaacaataccattttttcagtggataaggatggtcagtttatgattgatttcgaatacgataattataaggcttctcaatatttggatctgaccctcactccgatatctggagatgaatgcaagactcacgcatcgagtatagccgaacaattggcgtgtgtggatattattaaagaggatattagcgaatatatcaaaactactccccgtcttaaacgatttataaaaaaataccgcaatagatcagatactcgtatcagtcgagatacagaaaagcttaaaatagctctagctaaaggcatagattacgaatatataaaagacgcttgttaataagtaaatgaaaaaaaactagtcgtttataataaaacacaatatggatgccaacatagtatcatcttctactattgcaacgtatatagacgctttagcgaagaatgcttcagaattagaacagaggtctaccgcatacgaaataaataatgaattggaactagtatttattaagccgccattaattactttgacaaatgtagtgaatatctctacgattcaggaatcgtttattcgatttaccgttactaataaggaaggtgttaaaattagaactaagattccattatctaaggtacatggtctagatgtaaaaaatgtacagttagtagatgctatagataacatagtttgggaaaagaaatcattagtgacggaaaatcgtcttcacaaagaatgcttgttgagactatcgacagaggaacgtcatatatttttggattacaagaaatatggatcctctatccgactagaattagtcaatcttattcaagcaaaaacaaaaaactttacgatagactttaagctaaaatattttctaggatccggtgcccagtctaaaagttctttattacacgctattaatcatccaaagtcaaggcctaatacatctctggaaatagaattcacacctagagacaatgaaaaagttccatatgatgaactaataaaggaattgacgactctatcacgtcatatatttatggcttctccagagaatgtaattctttctccgcctattaacgcgcctataaaaacctttatgttgcctaaacaagatatagtaggtttggatctggaaaatctatatgccgtaactaagactgacggaattcctataactatcagagttacatcaaaagggttgtattgttattttacacatcttggttatattattagatatcctgttaagagaataatagattccgaagtagtagtctttggtgaggcagttaaggataagaactggaccgtatatctcattaagctaatagagcctgtgaatgcaatcaatgatagactagaagaaagtaagtatgttgaatctaaactagtggatatttgtgatcggatagtattcaagtcaaagaaatacgaaggtccgtttactacaactagtgaagtcgtcgatatgttatctacatatttaccaaagcaaccagaaggtgttattctgttctattcaaagggacctaaatctaacattgattttaaaattaaaaaggaaaatactatagaccaaactgcaaatgtagtatttaggtacatgtccagtgaaccaattatctttggagaatcgtctatctttgtagagtataagaaatttagcaacgataaaggctttcctaaagaatatggttctggtaagattgtgttatataacggcgttaattatctaaataatatctattgtttggaatatattaatacacataatgaagtgggtattaagtccgtggttgtacctattaagtttatagcagaattcttagttaatggagaaatacttaaacctagaattgataaaaccatgaaatatattaactcagaagattattatggaaatcaacataatatcatagtcgaacatttaagagatcaaagcatcaaaataggagatatctttaacgaggataaactatcggatgtgggacatcaatacgccaataatgataaatttagattaaatccagaagttagttattttacgaataaacgaactagaggaccgttgggaattttatcaaactacgtcaagactcttcttatttctatgtattgttccaaaacatttttagacgattccaacaaacgaaaggtattggcgattgattttggaaacggtgcggacctggaaaaatacttttatggagagattgcgttattggtagcgacggatccggatgctgatgctatagctagaggaaatgaaagatacaacaaattaaactctggaattaaaaccaagtactacaaatttgactacattcaggaaactattcgatccgatacatttgtctctagtgtcagagaagtattctattttggaaagtttaatatcatcgactggcagtttgctatccattattcttttcatccgagacattatgctaccgtcatgaataacttatccgaactaactgcttctggaggcaaggtattaatcactaccatggacggagacaaattatcaaaattaacagataaaaagacttttataattcataagaatttacctagtagcgaaaactatatgtctgtagaaaaaatagctgatgatagaatagtggtatataatccatcaacaatgtctactccaatgactgaatacattatcaaaaagaacgatatagtcagagtgtttaacgaatacggatttgttcttgtagataacgttgatttcgctacaattatagaacgaagtaaaaagtttattaatggcgcatctacaatggaagatagaccgtctacaaaaaactttttcgaactaaatagaggagccattaaatgtgaaggtttagatgtcgaagacttacttagttactatgttgtttatgtcttttctaagcggtaaataataatatggtatgggttctgatatccccgttctaaatgcattaaataattccaatagagcgatttttgttcctataggaccttccaactgtggatactctgtattgttaatagatatattaatacttttgtcgggtaacagaggttctacgtcttctaaaaataaaagtttgataacatctggcctgttcataaataaaaacttggcgattctatatatactcttattatcaaatctagccattgtcttatagatgtgagctactgtaggtgtaccatttgattttctttctaatactatatatttctctcgaagaagttcttgcacatcatctgggaataaaatactactgttgagtaaatcagttattttttttatatcgatattgatggacatttttatagttaaggataataagtatcccaaagtcgataacgacgataacgaagtatttatacttttaggaaatcacaatgactttatcagatcaaaattaacaaaattaaaggagcatgtatttttttctgaatatattgtgactccagatacatatggatctttatgcgtcgaattaaatgggtctagttttcagcacggtggtagatatatagaggtggaggaatttatagatgctggaagacaagttagatggtgttctacatccaatcatatatctgaagatatgcacactgataaatttgtcatttatgatatttatacgtttgattcgttcaagaataaacgattggtatttgtacaggtgcctccatcattaggagatgatagctatttgactaatccgttattgtctccgtattatcgtaattcagtagccagacaaatggtcaatgatatgatttttaatcaagattcatttttaaaatatttattagaacatctgattagaagccactatagagtttctaaacatataacaatagttagatacaaggataccgaagaattaaatctaacgagaatatgttataatagagataagtttaaggcgtttgtattcgcttggtttaacggcgtttcggaaaatgaaaaggtactagatacgtataaaaaggtatctaatttgatataatgaattcagtgactgtatcacacgcgccatatactattacttatcacgatgattgggaaccagtaatgagtcaattggtagagttttataacgaagtagccagttggctgctacgagacgagacgtcgcctattcctgataagttctttatacagttgaaacaaccgcttagaaataaacgagtatgtgtgtgtggtatagatccgtatccgaaagatggaactggtgtaccgttcgaatcaccaaattttacaaaaaaatcaattaaggagatagcttcatctatatctagattaaccggagtaattgattataaaggttataaccttaatataatagacggggttataccctggaattattacttaagttgtaaattaggagaaacaaaaagtcacgcgatctactgggataagatttccaagttactgctgcagcatataactaaacacgttagtgttctttattgtttgggtaaaacagatttctcgaatatacgggcaaagttagaatccccggtaactaccatagtcggatatcatccagcggctagagaccgccaattcgagaaagatagatcatttgaaattatcaacgttttactggaattagacaacaaggcacctataaattgggctcaagggtttatttattaatgctttagtgaaattttaacttgtgttctaaatggatgcaactattagaggtaatgatgttatctttgttcttaagactataggtgtcccgtcagcgtgcagacaaaatgaagatccaagatttgtagaagcatttaaatgcgacgagttagaaagatatattgagaataatccagaatgtacactattcgaaagtcttagggatgaggaagcatactctatagtcagaattttcatggatgtagatttagacgcgtgtctagacgaaatagattatttaacggctattcaagattttattatcgaggtgtcaaactgtgtagctagattcgcgtttacagaatgcggtgccattcatgaaaatgtaataaaatccatgagatctaatttttcattgactaagtctacaaatagagataaaacaagttttcatattatctttttagacacgtataccactatggatacattgatagctatgaaacgaacactattagaattaagtagatcatctgaaaatccactaaccagatcgatagacactgccgtatataggagaaaaacaactcttcgggttgtaggtactaggaaaaatccaaattgcgacactattcatgtaatgcaaccaccgcatgataatatagaagattacctattcacttacgtggatatgaacaacaatagttattacttttctctacaacgacgattggaggatttagttcctgataagttatgggaaccagggtttatttcattcgaagacgctataaaaagagtttcaaaaatattcattaattctataataaactttaatgatctcgatgaaaataattttacaacggtaccactggtcatagattacgtaacaccttgtgcattatgtaaaaaacgatcgcataaacatccgcatcaactatcgttggaaaatggtgctattagaatttacaaaactggtaatccacatagttgtaaagttaaaattgttccgttggatggtaataaactgtttaatattgcacaaagaattttagacactaactctgttttattaaccgaacgaggagaccatatagtttggattaataattcatggaaatttaacagcgaagaacccttgataacaaaactaattctgtcaataagacatcaactacctaaggaatattcaagcgaattactctgtccgaggaaacgaaagactgtagaagctaacatacgagacatgttaatagattcagtggagaccgatacctatccggataaacttccgtttaaaaatggtgtattggacctggtagacggaatgttttactctggagatgatgctaaaaaatatacgtgtactgtatcaaccggatttaaatttgacgatacaaagttcgtcgaagacagtccagaaatggaagagttaatgaatatcattaacgatatccaaccattaacggatgaaaataagaaaaatagagagttgtacgaaaaaactttatctagttgtttatgcggtgctaccaaaggatgtttaacattcttttttggagaaactgcaactggaaagtcgacaaccaaacgtttgttaaagtctgctatcggtgacctgtttgttgagacgggtcaaacaattttaacagatgtattggataaaggacctaatccatttatcgctaacatgcatttgaaaagatctgtattctgtagcgaactacctgattttgcctgtagtggatcaaagaaaattagatctgacaatattaaaaagttgacagaaccttgtgtcattggaagaccgtgtttctccaataaaattaataatagaaaccatgcgacaatcattatcgatactaattacaaacctgtctttgataggatagataacgcattaatgagaagaattgccgtcgtgcgattcagaacacacttttctcaaccttctggtagagaggctgctgaaaataatgacgcgtacgataaagtcaaactattagacgaggggttagatggtaaaatacaaaataatagatatagattcgcatttctatacttgttggtgaaatggtacaaaaaatatcatgttcctattatgaaactatatcctacaccggaagagattccggactttgcattctatctcaaaataggtactctgttagtatctagctctgtaaagcatattccattaatgacggacctctccaaaaagggatatatattgtacgataatgtggttactcttccgttgactactttccaacagaaaatatccaagtattttaattctagactatttggacacgatatagagagcttcatcaatagacataagaaatttgccaatgttagtgatgaatatctgcaatatatattcatagaggatatttcatctccgtaaatatatgctcatatatttatagaagatatcacatatctaaatgaataccggaatcatagatttatttgataatcatgttgatagtataccaactatattacctcatcagttagctactctagattatctagttagaactatcatagatgagaacagaagcgtgttattgttccatattatgggatcaggtaaaacaataatcgctttgttgttcgccttggtagcttccagatttaaaaaggtttacattctagtgcctaatattaacattttgaaaatttttaattataatatgggtgtagctatgaacttgtttaatgacgaattcatagctgagaatatctttattcattccacaacaagtttttattctcttaattataacgataacgtcattaattataacggattatctcgctacaataactctatttttatcgttgatgaggcacataatatctttgggaataatactggagaacttatgaccgtgataaaaaataaaaacaagattccttttttactattgtctggatctcccattactaacacacctaatactctgggtcatattatagatttaatgtccgaagagacgatagattttggtgaaattattagtcgtggtaagaaagtaattcagacacttcttaacgaacgaggtgtgaatgtacttaaggatttgcttaaaggaagaatatcatattacgaaatgcctgataaagatctaccaacgataagatatcacggacgtaagtttctagatactagagtagtatattgtcacatgtctaaacttcaagagagagattatatgattactagacgacagctatgttatcatgaaatgtttgataaaaatatgtataacgtgtcaatggcagtattgggacaacttaatctgatgaataatttagatactttatttcaggaacaggataaggaattgtacccaaatctgaaaataaataatggcgtgttatacggagaagaattggtaacgttaaacattagttccaaatttaaatactttattaatcggatacagacactcaacggaaaacattttatatacttttctaattctacatatggcggattggtaattaaatatatcatgctcagtaatggatattctgaatataatggttctcagggaactaatccacatatgataaacggcaaaccaaaaacatttgctatcgttactagtaaaatgaaatcgtctttagaggatctattagatgtgtataattctcctgaaaacgatgatggcagtcaattgatgtttttgttttcgtcaaacattatgtccgaatcctatactctgaaagaggtaaggcatatttggtttatgactatcccagatactttttctcaatacaaccaaattcttggacgatctattagaaaattctcttacgccgatatttctgaaccagttaatgtatatcttttagccgccgtatattccgatttcaatgacgaagtgacgtcattaaacgattacacacaggatgaattaattaatgttttaccatttgacatcaaaaagctgttgtatctaaaatttaagactaaagaaacgaatagaatatactctattcttcaagagatgtctgaaacgtattctcttccaccacatccatcaattgtaaaagttttattgggagaattggtcagacaatttttttataataattctcgtattaagtataacgataccaagttacttaaaatggttacatcagttataaaaaataaagaagacgctaggaattacatagatgatattgtaaacggtcacttctttgtatcgaataaagtatttgataaatctcttttatacaaatacgaaaacgatattattacagtaccgtttagactttcctacgaaccatttgtttggggagttaactttcgtaaagaatataacgtggtatcttctccataaaactgatgagatatataaagaaataaatgtcgagctttgttaccaatggataccttccagttacattggagccacacgagctgacgttagacataaaaactaatattaggaatgccgtatataagacgtatctccatagagaaattagtggtaaaatggccaagaaaatagaaattcgtgaagacgtggaattacctctcggcgaaatagttaataattctgtagttataaacgttccgtgtgtaataacctacgcgtattatcacgttggggatatagtcagaggaacattaaacatcgaagatgaatcaaatgtaactattcaatgtggagatttaatctgtaaactaagtagagattcgggtactgtatcatttagcgattcaaagtactgcttttttcgaaatggtaatgcgtatgacaatggcagcgaagtcactgccgttctaatggaggctcaacaaggtatcgaatctagttttgtttttctcgcgaatatcgttgactcataaaaaagagaatagcggtaagtataaacacgaatactatggcaataattgcgaatgttttattcccttcgatatatttttgataatatgaaaaacatgtctctctcaaatcggacaaccatctcataaaatagttctcgcgcgctggagaggtagttgctgctcgtataatctccccagaataatatacttgcgtgtcgtcgttcaatttatacggatttctatagttctctgttatataatgcggttttccatcatgattagacgacgacaatagtgttctaaatttagatagttgatcagaatgaatgtttattggcgttggaaaaattatccatacagcgtctgcagagtggttgatagttgttcctagatatgtaaaataatccaacttactaggcagcaaattgtctagataaaatactgaatcaaacggtgcagacgtattggtggatctaatggaatccaattgattaactatcttttgaaaatatacatttttatgatccgatacttgtaagaatatagaaataatgataagtccatcatcgtgtttttttgcctcttcataagaactatattttttcttattccaatgaacaagattaatctctccagagtatttgtacacatctatcaagtgattggatccataatcgtcttcctttccccaatatatacgtagtgatgataacacatattcattggggagaaaccctccacttatatatcctcctttaaaattaatccttactagttttccagtgttctggatagtggttggtttcgactcattataatgtatgtctaacggcttcaatcgcgcgttagaaattgcttttttagtttctatattaataggagatagttgttgcggcatagtaaaaatgaaatgataactgtttaaaaatagctcttagtatgggaattacaatggatgaggaagtgatatttgaaactcctagagaattaatatctattaaacgaataaaagatattccaagatcaaaagacacgcatgtgtttgctgcgtgtataacaagtgacggatatccgttaataggagctagaagaacttcattcgcattccaagcgatattatctcaacaaaattcagattctatctttagagtatccactaaactattacggtttatgtactacaatgaactaagagaaatctttagacggttgagaaaaggttctatcaacgatatcgatcctcactttgaagagttaatattattgggtggtaaactagataaaaaggaatctattaaagattgtttaagaagagaattaaaagaggaaagtgatgaacgtataacagtaaaagaatttggaaatgtaattctaaaacttacaacacgggataaattatttaataaagtatatataagttattgcatggcgtgttttattaatcaatcgttggaggatttatcgcatactagtatttacaatgtagaaattagaaagattaaatcattaaatgattgtattaacgacgataaatacgaatatctgtcttatatttataatatgctagttaatagtaaatgaacttttacagatctagtataattagtcagattattaagtataatagacgactagctaagtctattatttgcgaggatgactctcaaattattacactcacggcattcgttaaccaatgcctatggtgtcataaacgagtatccgtgtccgctattttattaactactgataacaaaatattagtatgtaacagacgagatagttttctctattctgaaataattagaactagaaacatgtctagaaagaaacgattatttctgaattattccaattatttgtccaaacaggaaagaagtatactatcgtcatttttttctctagatccagctactactgataatgatagaatagatgctatttatccgggtggcatacccaaaaggggtgagaatgttccagagtgtttatccagggaaattaaagaagaagttaatatagacaattcttttgtattcatagacactcggttttttattcatggcatcatagaagataccattattaataaattttttgaggtaatcttctttgtcggaagaatatctttaacgagtgatcaaatcattgatacatttaaaagtaatcatgaaatcaaggatctaatatttttagatccgaattcaggtaatggactccaatacgaaattgcaaaatatgctctagatactgcaaaactcaaatgttatggccatagaggatgttattacgaatcattaaaaaaattaactgaggatgattgattagaaaatataaattaatttaccatcgtgtatttttataacgggattgtccggcatatcatgtagatagttaccgtctacatcgtatactcgaccatctacgcctttaaatcctctatttattgacattaatctattagaattggaataccaaatattagtaccctcaattagtttattggtaatattttttttagacgatagatcgatggctcttgaaaccaaggttttccaaccggactcattgtcgatcggtgagaagtctttttcattagcatgaatccattctaatgatgtatgtttaaacactctaaacaattggacaaattcttttgatttgctttgaatgatttcaaataggtcttcgtctacagtaggcataccattagataatctagccattataaagtgcacgtttacatatctacgttctggaggagtaagaacgtgactattgagacgaatggctcttcctactatctgacgaagagacgcctcgttccatgtcatatctaaaatgaagatatcattaattgagaaaaaactaataccctcgcctccactagaagagaatacgcatgttttaatgcattctccgttagtgtttgattcttggttaaactcagccaccgccttgattctagtatcttttgttctagatgagaactctatattagagataccaaagactttgaaatatagtaataagatttctattcctgactgattaacaaatggttcaaagactagacatttaccatgggatgctaatattcccaaacatacatctataaatttgacgcttttctcttttaattcagtaaatagagagatatcagccgcactagcatcccctttcaatagttctccctttttaaaggtatctaatgcggatttagaaaactctctatctcttaatgaatttttaaaatcattatatagtgttgctatctcttgcgcgtattcgcccggatcacgattttgtctttcaggaaagctatcgaacgtaaacgtagtagccatacgtctcagaattctaaatgatgatatacctgtttttatttcagcgagtttagccttttgataaatttcttcttgctttttcgacatattaacgtatcgcattaatactgttttcttagcgaatgatgcagacccttctacgtcatcaaaaatagaaaactcgttattaactatgtacgaacataggcctcctagtttggagactaattctttctcatcaactagacgtttattctcaaatagcgattggtgttgtaaggatcctggtcgtagtaagttaaccaacatggtgaattcttgcacactattaacgataggtgtagccgataaacaaatcatcttatggttttttaatgcgatggtcttagataaaaaattatatactgaacgagtaggacggatcttaccatcttctttgattaatgatttagaaatgaagttatgacattcatcaataatgacgcatattctactcttggaattaatagttttgatattagtaaaaaatttatttctaaaattttgatcatcgtaattaataaaaatacaatccttcgttatctctggagcgtatctgagtatagtgttcatccaaggatcttctatcaaagcctttttcaccaataagataatagcccaattcgtataaatatccttaagatgtttgagaatatatacagtagtcattgttttaccaacacccgtttcatggaacaataaaagagaatgcatactgtctaatcctaagaaaactcttgctacaaaatgttgataatccttgaggcgtactacgtctgttcccatcatttcaacaggcatattagtagttctgcgcaatgcataatcgatataggccgcgtgtgatttactcatttatgagtgataagtaataactatgttttaaaaatcacagcagtagtttaactagtcttctctgatgtttgttttcgatactttttgaatcagaagtcatactagaataaagcaacgagtgaacgtaatagagagcttcgtatactctattcgaaaactctaagaacttattaatgaattccgtatccactggattgtttaaaatactaaattgaacactgttcacatccttccaagaagaagacttagtgacggacttaacatgagacataaataaatccaaattttttttacaaacatcactagccaccataatggcgctatctttcaaccagctatcgcttacgcattttagcagtctaacatttttaaagagactacaatatattctcatagtatcgattacacctctaccgaataaagttggaagtttaataatacaatatttttcgtttacaaaatcaaataatggtcgaaacacgtcgaaggttaacatcttataatcgctaatgtatagattgttttcagtgagatgattattagatttaatagcatctcgttcacgtttgaacagtttattgtgtgcgctgaggtcggcaactacggcgtccgctttagtactcctcccataatactttacgctattaatctttaaaatttcatagactttatctagatcgctttctggtaacatgatatcatgtgtaaaaagttttaacatgtcggtcggcattctatttagatcattaactctagaaatctgaagaaagtaattagctccgtattccagactaggtaatgggcttttacctaaagacaagttaagttctggcaatgtttcataaaatggaagaaggacatgcgttccctcccggatattttttacaatttcatccatttacaactctatagtttgttttcattattattagttattatctcccataatcttggtaatacttaccccttgatcgtaagataccttatacaggtcattacatacaactaccaattgtttttgtacataatagattggatggttgacatccatggtggaataaactactcgaacagatagtttatctttccccctagatacattggccgtaatagttgtcggcctaaagaatatctttggtgtaaagttaaaagttagggttcttgttccattattgctttttgtcagtagttcattataaattctcgagatgggtccgttctctgaatatagaacatcatttccaaatctaacttctagtctagaaataatatcggtcttattcttaaaatctattcccttgatgaagggatcgttaatgaacaaatccttggcctttgattcggctgatctattatctccgttatagacgttacgttgactagtccaaagacttacaggaatagatgtatcgatgatgttgatactatgtgatatgtgagcaaagattgttctcttagtggcatcactatatgttccagtaatggcggaaaactttttagaaatgttatatataaaagaattttttcgtgttccaaacattagcagattagtatgaagataaacactcatattatcaggaacattatcaatttttacatacacatcagcatcttgaatagaaacgataccatcttctggaacctcaacaatctcggcagactccggataaccagtcggtgggccatcactaacaataactagatcatccaacaatctactcacatatgcatctatataatctttttcatcttgtgagtaccctggatacgaaataaatttattatccgtatttccataataaggtttagtataaacagagagcgatgttgccgcatgaacttcagttacagtcgccgttggttggtttatttgacctattactctcctaggtttctctataaacgatggtttaatttgtacattcttaaccatatatccaataaagctcaattcaggaacataaacaaattctttgttgaacgtttcaaagtcgaacgaagagtcacgaataacgatatcggatactggattgaaggttaccgttacggtaatttttgaatcggatagtttaagactgctgaatgtatcttccacatcaaacggagttttaatataaacgtatactgtagatggttctttaatagtgtcattaggagttaggccaatagaaatatcattaagttcactagaatatccagagtgtttcaaagcaattgtattattgatacaattattatataattcttcgccctcaatttcccaaataacaccgttacacgaagagatagatacgtgattaatacatttatatccaacatatggtacgtaaccgaatcttcccatacctttaacttctggaagttccaaactcagaaccaaatgattaagcgcagtaatatactgatccctaatttcgaagctagcgatagcctgattgtctggaccatcgtttgtcataactccggatagagaaatatattgcggcatatacaaagttggaatttgactatcgactgcgaagacattagaccgtttaatagagtcatccccaccgatcaaagaattaatgatagtattattcattttctatttaaaatggaaaaagcttacaataaactccgtagagaaatatctataatttgtgagttttccttaaagtaacagcttccgtaaacgccgtctttatctcttagtaggtttattgtatttatgaccttttccttatcttcatagaatactaaaggcaacaaagaaatttttggttcttctctaagagctacgtgagacttaaccatagaagccaacgaatccctacatattttagaacagaaatacccaacttcaccacccttgaatgtctcaatactaataggtctaaaaaccaaatcttgattacaaaaccaacacttatcaattacactatttgtcttaatagacacatctgccatagatttataatactttggtagtatacaagcgagtgcttcttctttagcgggcttaaagactgctttaggtgctgaaataaccacatctggaaggcttactcgcttagccatttaattacggaactatttttttatacttctaatgagcaagtagaaaacctctcatctacaaaaacatactcgtgtccataatcctctaccatagttacacgttttttagatctcatatgtgctaaaaagttttcccatactaattggttactattatttttcgtataatttttaacagtttgaggttttagatttttagttacagaagtgatatcgaatattttatccaaaaagaatgaataattaattgtcttagaaggagtgttttcttggcaaaagaataccaagtgcttaaatatttctactacttcattaatcttttctgtactcagattcagtttctcatcttttacttgattgattatttcaaagactaacttataatcctttttatttattctctcgttagccttaagaaaactagatacaaaatttgcatctacatcatccgtggatatttgatttttttccatgatatccaagagttccgagataatttctccagaacattgatgagacaataatctccgcaatacatttctcaaatgaataagtttattagacacatggaagtttgactttttttgtacctttgtacatttttgaaatacagactcgcaaaaaatacaatattcatatccttgttcagatactataccgttgtgtctacaaccgctacataatcgtagattcatgttaacactctacgtatctcgtcgtccaatattttatataaaaacattttatttctagacgttgccagaaaatcctgtaatatttttagttttttgggctgtgaataaagtatcgccctaatatggttaccgtcctccgccaatatagtagttaaattatccgcacatgcagaagaacaccgcttaggcggattcagtacaatgttatatttttcgtaccaactcatttaaatatcataatctaaaatagttctgtaatatgtctagcgctaatatattgatcataatcctgtgcataaattaagatacaacaatgtctcgaaatcatcgacatggcttcttccatagttagaagatcgtcgtcaaagttagcaacgtgattcatcaacatttgctgttttgaggcagcaaatactgaaccgtcgccattcaaccattcataaaaaccatcgtctgaatccattgataatttcttgtactggtttttgagagctcgcatcaatctagcatttctagctcccggattgaaaacagaaagaggatcgtacatccagggtccattttctgtaaatagaatcgtataatgtcccttcaagaagatatcagacgatccacaatcaaagaattggtctccgagtttgtaacaaactgcggactttaacctatacatgataccgtttagcatgatttctggtgatacgtcaatcggagtatcatctattagagatctaaagccggtgtaacattctccaccaaacatattcttattctgacgtcgttctacataaaacatcattgctccattaacgataacaggggaatgaacagcactacccatcacattagttcccaatggatcaatgtgtgtaactccagaacatcttccatatcctatgttaggaggagcgaacaccactcttccactattgccatcgaatgccatagaataaatatccttggaattgatagaaatcggactgtcggatgttgtgatcatcttcataggattaacaactatgtatggtgccgcctgaagtttcatatcgtaactgatgccgtttataggtctagccacagaaaccaacgtaggtctaaatccaactatagacaaaatagaagccaatatctgttcttcatctgtcataacttgagagcatccagtatgaataatcttcattagatggggatctaccgcatcatcatcgttacaataaaaaattcccattctaatgttcataattgcttttctaatcatggtatgcatgtttgctctctgaatctctgtggaaattagatctgatacacctgtaatcactatcggattatcctccgtaagacgattaaccaacaacatataattataagactttacttttctaaattcataaagttgctggattaggctataggtgtctccatgtacatacgcgttctcgagcgcaggaagtttaataccgaatagtgccatcagaataggatgaatatagtaattagtttctggttttctataaataaaagacaaatcttgtgaactagacatatcggtaaaatgcatggattggaatcgtgtagtcgacagaagaatatgatgattagatggagagtatattttatctaactctttgagttggtcaccgattctaggactagctcgagaatgaataagtactaaaggatgagtacatttcacagaaacactagcattgttcaatgtgctctttacatgggtaaggagttgaaatagctcgtttctatttgttctgacaatatttagtttattcataatgttaagcatatcctgaatagtaaagttagatgtgtcatacttgttagtagttagatatttagcaattgcattcccatcatttctcaatctcgtactccaatcatgcgtggatgctacttcgtcgatggaaaccatacaatcctttttgataggctgttgagattgattatttcctgcacgtttaggtttggtacgttgatttctagcccctgcggatataaagtcatcgtctacaattttggataatgaattgcatacactacaagacaaagatttatcagaagtgtgaatatgatcttcatctaccaaagaaagagtttgattagtataactagattttagtcctgcgttagatgttaaaaaaacatcgctattgaccacggcttccattatttatattcgtagtttttactcgaaagcgtgattttaatattcaatcttattacttttggaatcgttcaaaacctttgactaattgtagaatttgatctattgccctacgcgtatactcccttgcatcatatacgttcgtcaccagatcgtttgtttcggcctgaagttggtgcatatctctttcaacattcgacatgagatccttaagggccatatcgtctagattttgttgagatgctgctcctggatttggattttgttgtgctgttgtacatactgtaccaccagtaggtgtaggagtacatacagtggccacaataggaggttgaggaggtgtaaccgttggagtagtacaagaaatacttccatccgattgttgtgtacatgtagttgttggtaacgtctgagaaggttgggtagatggcggcgtcgtcgtcttttgatctttattaaatttagagataatatcctgaacagcattgctcggcgtcaacgctggaaggagtgaactcgccggcgcatcagtatctgcagacagccaatcaaaaagattagacatatcagatgatgtattagtttgttgtcgtggttttggtgtaggagccggtgtagctgttggaaccggctgtggagttatatgaatagttggttgtagcggttggataggctgtctgctggcggccatcatattatctctagctagttgttctcgcaactgtctttgataatacgactcttgagactttagtcctatttcaatcgcttcatcctttttcgtatccggatccttttcttcagaataatagattgacgactttggtgtagaggattctgccagcccctgtgagaacttgttaaagaagtccatttaaggctttaaaattgaattgcgattataagattaaatggcagacacagacgatattatcgactatgaatccgatgatctcaccgaatacgaggatgatgaagaagaggaagaagatggagagtcactagaaactagtgatatagatcccaaatcttcttataagattgtagaatcagcatccactcatatagaagatgcgcattccaatcttaaacatatagggaatcatatatctgctcttaaacgacgctatactagacgtataagtctatttgaaatagcgggtataatagcagaaagctataacttgcttcaacgaggaagattacctctagtttcagaattttctgacgaaacgatgaagcaaaatatgctacatgtaattatacaagagatagaggagggttcttgtcctatagtcatcgaaaagaacggagaattgttgtcggtaaacgattttgacaaagatggtctaaaattccatctagactatattatcaaaatttggaaacttcaaaaacgatattagaatttatacgaatatcgttctctaaatgtcacaatcaagtctcgcatgttcagcaatttattgtcgtactttatatcgtgttcattaacgatatcttgcaaaatagtaatgattctatcttccttcgatagatattcttcagagattattgtcttatattctttcttgttatcagatatgaatttgataagactttgaacattattgatacccgtctgtttaattttttctacagatattttagttttggcagattctatcgtatctgtcaatagacatccaacatcgacattcgacgtcaattgtctataaatcaacgtataaattttagaaataacattagcgaattgttgtgcattgatgtcgttattctgaaacagtatgattttaggtagcattttcttaacaaagagaacgtatttattgttactcagttgaacagatgatatatccagattactaacgcatctgattccatataccaaactttcagaagaaatggtgtacaattgtttgtattcattcaatgtctctttttcagaaattagtttagagtcgaatactgcaataattttcaagagatagttttcatcagataagattttatttagtgtagatatgataaaactattgttttgttggagaacttgatacgccgcgttctctgtagtcgacgctctcaaatgggaaacaatctccattatttttttggaatcggatacaatatcttcggtatcttgacgcaatctagtatacatagagttaagagaaattagagtttgtacattaagcaacatgtctctaaatgtggctgcaaacttttccttttccacatcatctagtttattatataccgatttcacaacggcaccagatttaaggaaccagaatgaaaaactctgataactacaatatttcatcatagttacgattttatcatcttctatagttggtgtaatagcgcatacctttttctccaagactggaaccaacgtcataaaaatgtttaaatcaaaatccatatcaacatctgatgcgctaagaccagtctcgcgttcaagattatctttactaatggtgacgaactcatcgtatagaactctaagtttgtccattatttatttacagatttagttgtttaatttatttgtgctcttccagagttgggatagtatttttctaacgtcggtattatattattaggatctacgttcatatgtatcataatattaatcatccacgttttgataaatctatctttagcttctgaaataacgtatttaaacaaaggagaaaaatatttagctacggcatcagacgcaataacattttttgtaaatgtaacgtatttagacgacagatcttcgttaaaaagttttccatctatgtagaatccatcggttgttaacaccattcccgcgtcagattgaataggagtttgaatagtttgttttggaaatagatccttcaataacttatagttgggtgggaaaaaatcgattttatcactagactctttcttttttactatcattacctcatgaactatttcttgaatgagtatatgtattttctttcctatatcggacgcgttcattggaaaatataccatgtcgttaactataagaatatttttatcctcgtttacaaactgaataatatcagatgtagttcgtaaacgaactatatcatcaccagcacaacatctaactatatgatatccactagtttcctttagtcgtttattatcttgttccatattagcagtcattccatcatttaagaaggcgtcaaagataatagggagaaatgacattttggattctgttacaactttaccaaaattaaggatatacggacttactatctttttctcaacgtcgatttgatgaacacacgatgaaaatgtacttcgatgagattgatcatgtagaaaacaacaagggatacaatatttccacatatcatgaaatatattaagaaatcccaccttattatatttccccaaaggatccatgcatgtaaacattatgccgttatcattaataaagacttctttctcatcggatctgtaaaagttgttactgatttttttcattccaggatctagataattaataatgatgggttttctattcttattctttgtattttggcatatcctagaccagtaaacagtttccactttggtaaaatcagcagacttttgaacgctattaaacatggcattaatggcaataactaaaaatgtaaaatatttttctatgttaggaatatggtttttcactttaatagatatatggtttttggccaaaatgatagatatttttttatccgaggatagtaaaatattattagtcgccgtctctataaaaatgaagctagtctcgatatccaattttattctagaattgataggagtcgccaaatgtaccttatacgttatatctcccttgatgcgttccatttgtgtatctatatcggacacaagatctgtaaatagttttacgttattaatcatcacggtatcgccgtcgctagataacgctaatgtaccatccaagtcccaaatggagagatttaactgttcatcgtttagaataaaatgattaccggtcatattaataaagtgttcatcgtatctagataacaacgacttataattaatgtccaagtcttgaactcgctgaatgatcttttttaacccagttagttttagattggtacgaaatatattgttaaactttgattctacagtaatgtccaaatctagttgtggaaatacttccatcaacattgtttcaaacttgataatattattatctacatcttcatacgatccaaattccggaatagatgtatcgcacgctctggccacccagataaccaaaaagtcacacgctccaggatatacattgtataaaaagctatcgttttttagtagtgtttttttctgagtatatacgaagggattaaaaatagtattatcaacgtaactatattccaaattattcttatgagaatagataataatatcgtccttaatatctaacaaatttcctaaatatccctttaattgagtcattcgaagcgtcaatagaatatgtctcttaactatttccggctgttgtatatttaaatgacttcgtaaaaaataatatatgggcgacttctcatctatgtaatcatatggagtgagatatagggctcgttctacctcctgccccttacccacctgtaataccaattgcggacttactatatatcgcatatttatatcgtggggtaaagtgaaaatctactaccgatgatgtaagtcttacaatgttcgaaccagtaccagatcttaatttggaggcctccgtagaactaggggaggtaaatatagatcaaacaacacctatgataaaggaaaatagcggttttatatcccgtagtagacgtctattcgcccatagatctaaggatgatgagagaaaactagcactacgattctttttacaaagactttattttttagatcatagagagattcattatttgttcagatgcgttgacgctgtaaaagacgtcactattaccaaaaaaaataacattatcgtggcgccttatatagcacttttaactatcgcatcaaaaggatgcaaacttacagaaacaatgattgaagcattctttccagaactatataatgaacatagtaagaaatttaaattcaactctcaagtatccatcatccaagaaaaactcggataccagtttggaaactatcacgtttatgattttgaaccgtattactctacagtagctctggctattcgagatgaacattcatctggcatttttaatatccgtcaagagagttatctggtaagttcattatctgaaataacatatagattttatctaattaatctaaaatctgatcttgttcaatggagtgctagtacgggcgctgtaattaatcaaatggtaaatactgtattgattacagtgtatgaaaagttacaactggtcatagaaaatgattcacaatttacatgttcattggctgtggaatcaaaacttccaataaaattacttaaagatagaaatgaattatttacaaaattcatcaacgagttaaaaaagaccagttcattcaagataagcaaacgcgataaggatacgctactaaaatattttacttaggactggagttagaatttatagacgactcatttcgtttatcattattagtattcttcttgttatcttgttcagaaatatacagcaatgctatgcctaatactaaatacattatcatgcttgcaatggctctaacaacgacgaaccaaaatgaatttggtcgtagcttttgttcacaaaaatacataaagaaatgtctacataaatctatggcgccattggctacttgaaatagcgccagtcctcctacagattttaatatagctgtataacatgacatttattcatcatcaaaagagacagagtcaccatctgtcatatttagattttttttcatgtgttcaaagtatcctctactcatttcattataatagtttatcatacttagaattttaggacggatcaatgagtaagacttgactagatcgtcagtagtaatttgtgcatcgtctattctgcatccgcttcgtcgaataatgtatagcatcgctttgagattctccatagctatcaagtctttatacaatgacatggaaatatctgtgaatactttatacttctccaacatcgatgccttaacatcatcgcctactttagcattgaaaatacgttctattgtgtagatggatgtagcaagatttttaaacaacaatgccattttacacgatgattgcctcaagtctccaatcgtttgtttagaacgattagctacagagtccaatgcttggctgactagcatattattatctttagaaattgtattcttcaatgaggcgtttatcatatctgtgatttcgttagtcatattacagtctgactgggttgtaatgttatccaacatatcacctatggatacggtacacgtaccagcatttgtaataatcctatctaagatgttgtatggcattgcgcagaaaatatcttctcctgtaatatttccactctcgataaatctactcagattattcttaaatgccttattctctggagaaaagatatcagtgtccatcatttcattaatagtatacgcagaaaagataccacgagtatcaattctatccaagatacttatcggttccgagtcacagataatggtttcctctccttcgggagatcctgcatagaaatatctaggacaatagtttctatactgtctgtaactctgataatctctaaagtcactaactgataccatgaaattgagaagatcaaacgctgaagtaattaatttttctgcctcgtttttactacaactagttttcatcaatgtagtgacgatgtattgtttagttactcttggtctaatactgatgatagagatattattacttcccataatggatcttctagtagtcaccttaaagcccattgatgcaaatagcagatagataaagtcttggtatgactcctttctaatatagtacggactacctttgtcacccaactttatacccacataagccataacaacctctttaatagccgtttcatgaggtttatcagccatgagcctgagtagttggaagaatctcatgaatcctgtctcagaaagtcctatatgcatgatagatttatctttcctgggaaactctcgtatagtcatagatgaaatactcttcaaagtttctgaaataagattagtaacagtcttacctccgactactctaggtaacaaacaaactctaataggtgttttctctgcggagataatatcagaaaggatagagcaataagtagtattattgtgattataaagaccgaatacataacaggtagaatttataaacatcatgtcctgaaggtttttagacttgtattcctcgtaatccataccgtcccaaaacatggatttggtaactttgatagccgtagatctttgttccttcgccaacaggttaaagaaattaataaagaatttgtggtttctacctatgtctacaaattgcacgtttggaagcgccacggttacattcactgcagcattttgaggatcgcgagtatgaagtacgatgttattgtttactggtatatctggaaagaattctaccagtctaggaataagagattgatatcgcatagaaatacaaaagttcataatctcatcatctaagagcattttgttaccattgtaataaatatccactctgtcatatgtataaatgaagtactgttcaaacatgatgagatgtttatatgttggcatagtagtgagatctacgtttggtaatggcaatgtattaagattaactccataatgtctagcagcatctgcgatgttataagcgttgtcaaagcggggtcgatcttgtgctgttatatattgtctaacacctataagattatcaaaatcttgtctgcttaatacaccgttaacaatttttgccttgaattcttttattggtgcattaataacatccttatagaggatgttaaacaaataagtgttatcaaagttaagatctggatatttcttttctgctagaacatccattgagtcggagccatctggtttaatataaccaccgataaatctagctctgtattctgtatccgtcaatctaatattaagaaggtgttgagtgaaaggtggaagatcgtaaaagctgtgagtattaatgataggattagtttccgaactaatgttaattggggtattaataatatctatatttccagcgttaagtgtaacattaaacagttttaattcacgtgacgtggtatcaattaaataattaatgcccaatttggatatagcagcctgaagctcatcttgtttagttacggatcctaatgagttattaagcaatatatcgaacggatgaacgaaggttgttttaagttggtcacatactttgtaatctagacatagatgcggaagaacggtagaaactatacgaaataaatattcagagtcctctaattgatcaagagtaactattgacttaataggcatcatttatttagtattaaatgacgaccgtaccagtgacggatatacaaaacgatttaattacagagttttcagaagataattatccatctaacaaaaattatgaaataactcttcgtcaaatgtctattctaactcacgttaacaacgtggtagatagagaacataatgccgccgtagtgtcatctccagaggaaatatcctcacaacttaatgaagatctatttccagatgatgattctccggccactattatcgaacgagtacaacctcatactactattattgacgatactccacctcctacgtttcgtagagagttattgatatcggaacaacgtcaacaacgagaaaaaagatttaatattacagtatcgaaaaatgctgaagcaataatggaatctagatctatgatatcttctatgccaacacaaacaccatccttgggagtagtttatgataaagataaaagaattcagatgttggaggatgaagtggttaatcttagaaatcaacgatctaatacaaaatcatctgataatttagataattttaccagaatactatttggtaagactccgtataaatcaacagaagttaataagcgtatagccatcgttaattatgcaaatttgaacgggtctcccttatcagtcgaggacttggatgtttgttcagaggatgaaatagatagaatctataaaacgattaaacaatatcacgaaagtagaaaacgaaaaattatcgtcactaacgtgattattattgtcataaatattatcgagcaagcattgctaaaactcggatttgaagaaatcaaaggactgagtaccgatatcacttcagaaattatcgatgtggagatcggagatgactgcgatgctgtagcatcaaaactaggaatcggtaacagtccggttcttaatattgtattgtttatactcaagatattcgttaaacgaattaaaattatttaatttaatacattcccatatccagacaacaatcgtctggattaatctgttcctgtcgtctcataccggacgacatattaatctttttattagtaggcatctttttagatggtttctttttcccagcattaactgagtcgatacctagaagatcgtgattgatctctccgaccattccacgaacttctaattggccgtctctgacggtaccataaactattttaccagcattagtaacagcttggacaatctgaccatccatcgcattgtacgatgtagtagtaactgttgttctacgtctaggagcaccagaagtatttttggagcccttggatgttgatgtagaagaagacgaggattttgattttggtttacatgtaatacattttgtatcacatgcgccggcagtcacatctgtttgagaattaagattattgttgcctcctttgacggctgcatctccaccgatttgcgctagtagatttttaagctgtggtgtaatcttattaactgtttcgatataatcatcgtaactgcttctaacggctaaattttttttatccgccatttagaagctaaaaatatttttatttatgcagaagatttaactagattatacaatgaactaatatgatccttttccagattatttacaaacttggtattttttggttctggaggaggcgaatttaaattcggacttggatttggattttgtgggttcttgatcttattatacagcgcatataggatggcgacggtaactgctacgcaaataccgatcaacaaaagaataccaatcatttattgacaataacttcactattgatcaagtatgcaatatatcatcttttcactaaataagtagtaataatgattcaacaatgtcgagatatatggacgataataatttagttcatggaaatatcgctatgattggtatgaatgactccgctaactctgtggggcgcgcagtgctttccccacatagaataaattagcattccgactgtgataataataccaagtataaacgccataatactcaatactttccatgtacgagtgggactggtagacttactaaagtcaataaaggcgaagatacacgaaagaatcaaaagaatgattccagcgattagcacgccggaaaaataatttccaatcataagcatcatatccatttaactaataaaaattttaaatcgccgaatgaacaaagtggaatataaaccatataaaaacaatagtttgtactgcaaaaataatatctatttttgttttcgaagatatggtaaaattaaatagtagtacacagcatgttataactaacagcagcaacggctcgtaattacttatcatttactagacgaaaaggtggtgggatattttcttgctcaaataatacgaatatatcacccatccattttatgcgatgtttatatactctaatctttaatagatctatagacgacgggtttaccaacaatatagattttatcgattcatctaatttaaacccttccttaaacgtgaatgatctattatctggcataacgatgactctacccgatgaatcggacaatgtactgggccatgtagaataaattatcaacgaattatcgtctacgaacatttatatcatttgttttaattttagtacgcgaataaatagatataaaatagaaaataacagatattacaaccaatgttatggccgcgcccggccggccgcggccgctttttttctagacactaaataaatagtaagattaaattaattataaaattatgtatataatattaattataaaattatgtatatgatttactaactttagttagataaattaataatacataaattttagtatattaatattataaattaataatacataaattttagtatattaatattatattttaaatatttatttagtgtctagaaaaaaaggcctagcaggcc

SEQ ID NO: 4 - DNA, 62068 bp, synthetic construct
  source 1..62068: mol_type = other DNA
ggcctagcaggcctttttttctagacactaaataaatagtaagattaaattaattataaaattatgtatataatattaattataaaattatgtatatgatttactaactttagttagataaattaataatacataaattttagtatattaatattataaattaataatacataaattttagtatattaatattatattttaaatatttatttagtgtctagaaaaaaaggccggccgggtattaataatatctatatttccagcgttaagtgtaacattaaacagttttaattcacgtgacgtggtatcaattaaataattaatgcccaatttggatatagcagcctgaagctcatcttgtttagttacggatcctaatgagttattaagcaatatatcgaacggatgaacgaaggttgttttaagttggtcacatactttgtaatctagacatagatgcggaagaacggtagaaactatacgaaataaatattcagagtcctctaattgatcaagagtaactattgacttaataggcatcatttatttagtattaaatgacgaccgtaccagtgacggatatacaaaacgatttaattacagagttttcagaagataattatccatctaacaaaaattatgaaataactcttcgtcaaatgtctattctaactcacgttaacaacgtggtagatagagaacataatgccgccgtagtgtcatctccagaggaaatatcctcacaacttaatgaagatctatttccagatgatgattctccggccactattatcgaacgagtacaacctcatactactattattgacgatactccacctcctacgtttcgtagagagttattgatatcggaacaacgtcaacaacgagaaaaaagatttaatattacagtatcgaaaaatgctgaagcaataatggaatctagatctatgatatcttctatgccaacacaaacaccatccttgggagtagtttatgataaagataaaagaattcagatgttggaggatgaagtggttaatcttagaaatcaacgatctaatacaaaatcatctgataatttagataattttaccagaatactatttggtaagactccgtataaatcaacagaagttaataagcgtatagccatcgttaattatgcaaatttgaacgggtctcccttatcagtcgaggacttggatgtttgttcagaggatgaaatagatagaatctataaaacgattaaacaatatcacgaaagtagaaaacgaaaaattatcgtcactaacgtgattattattgtcataaatattatcgagcaagcattgctaaaactcggatttgaagaaatcaaaggactgagtaccgatatcacttcagaaattatcgatgtggagatcggagatgactgcgatgctgtagcatcaaaactaggaatcggtaacagtccggttcttaatattgtattgtttatactcaagatattcgttaaacgaattaaaattatttaatttaatacattcccatatccagacaacaatcgtctggattaatctgttcctgtcgtctcataccggacgacatattaatctttttattagtaggcatctttttagatggtttctttttcccagcattaactgagtcgatacctagaagatcgtgattgatctctccgaccattccacgaacttctaattggccgtctctgacggtaccataaactattttaccagcattagtaacagcttggacaatctgaccatccatcgcattgtacgatgtagtagtaactgttgttctacgtctaggagcaccagaagtatttttggagcccttggatgttgatgtagaagaagacgaggattttgattttggtttacatgtaatacattttgtatcacatgcgccggcagtcacatctgtttgagaattaagattattgttgcctcctttgacggctgcatctccaccgatttgcgctagtagatttttaagctgtggtgtaatcttattaactgtttcgatataatcatcgtaactgcttctaacggctaaattttttttatccgccatttagaagctaaaaatatttttatttatgcagaagatttaactagattatacaatgaactaatatgatccttttccagattatttacaaacttggtattttttggttctggaggaggcgaatttaaattcggacttggatttggattttgtgggttcttgatcttattatacagcgcatataggatggcgacggtaactgctacgcaaataccgatcaacaaaagaataccaatcatttattgacaataacttcactattgatcaagtatgcaatatatcatcttttcactaaataagtagtaataatgattcaacaatgtcgagatatatggacgataataatttagttcatggaaatatcgctatgattggtatgaatgactccgctaactctgtggggcgcgcagtgctttccccacatagaataaattagcattccgactgtgataataataccaagtataaacgccataatactcaatactttccatgtacgagtgggactggtagacttactaaagtcaataaaggcgaagatacacgaaagaatcaaaagaatgattccagcgattagcacgccggaaaaataatttccaatcataagcatcatatccatttaactaataaaaattttaaatcgccgaatgaacaaagtggaatataaaccatataaaaacaatagtttgtactgcaaaaataatatctatttttgttttcgaagatatggtaaaattaaatagtagtacacagcatgttataactaacagcagcaacggctcgtaattacttatcatttactagacgaaaaggtggtgggatattttcttgctcaaataatacgaatatatcacccatccattttatgcgatgtttatatactctaatctttaatagatctatagacgacgggtttaccaacaatatagattttatcgattcatctaatttaaacccttccttaaacgtgaatgatctattatctggcataacgatgactctacccgatgaatcggacaatgtactgggccatgtagaataaattatcaacgaattatcgtctacgaacatttatatcatttgttttaattttagtacgcgaataaatagatataaaatagaaaataacagatattacaaccaatgttatggccgcgcccaaccaggtaggcagttttattttatcttttactacaggttctcctggatgtacgtcaccaacggcggacgtagttctagtacaattagacgtaagttccgcttgggaattttttaacgctaaagagttaacgttaatcgtgcacccaacgtatttacatctagttctttgaacatcttgattataatataaccattttctatctctagattcgtcggtgcactcatgtaaccaacataccctaggtcctaaatatttatctccggaattagattttggataattcgcgcaccaacaatttctatttcctttatgatcgttacaaaagacgtataatgccgtatccccaaaagtaaaataatcaggacgaataattctaataaactcagaacaatatctcgcatccatatgtttggagcaaatatcggaataagtagacatagccggtttccgttttgcacgtaaccattctaaacaattggggtttccaggatcgtttctacaaaatccagtcatgaaatcatcacaatgttctgtcttgtaattattattaaatatttttggacagtgtttggtatttgtcttagaacaacattttgccacgctatcactatcgcccaggagataatccttttttataaaatgacatcgttgcccggatgctatataatcagtagcgtgttttaaatccttaatatattcaggagttacctcgttctgataatagattaatgatccaggacgaaatttgaaagaactacatggttctccatgaattaatacatattgtttagcaaattcaggaactataaaactactacaatgatctatcgacataccatctatcaaacaaaacttgggtttaatttctcccggagatgtttcataatagtacgtataactttcttctgcaaacttaacagctctattatattcaggataattaaaacctaattccatatatttgtctcgtatatctgctattcctggtgctattttgattctattaagagtaacggctgcccccatttttaataatcgtcagtatttaaactgttaaatgttggtatatcaacatttaccttatttcccgcagtataaggtttgttgcaggtatactgttcaggaatggttacatttatactttttctatagtcctgtctttcgatgttcatcacatatgcaaagaacagaataaacaaaataatgtaagaaataatattaaatatctgtgaattcgtaaatacattgattgccataataattacagcagctacaatacatacaatagacattcccacagtgttgccattacctccacgatacatttgagttactaagcaataggtaataactaagctagtaagaggcaatagaaaagatgagataaatatcatcaatatagagattagaggagggctatatagagccaagacgaacaaaatcaaaccgagtaacgttctaacatcattatttttgaagattcccaaataatcattcattcctccataatcgttttgcatcatacctccatctttaggcataaacgattgctgctgttcctctgtaaataaatctttatcaagcactccagcacccgcagagaagtcgtcaagcatattgtaatatcttaaataactcatttatatattaaaaaatgtcactattaaagatggagtataatctttatgccgaactaaaaaaaatgacttgtggtcaacccctaagtctttttaacgaagacggggatttcgtagaagttgaaccgggatcatcctttaagtttctgatacctaagggattttacgcctctccttccgtaaagacgagtctagtatttgaaacattaacaacgaccgataataaaattactagtatcaatccaacaaatgcgccaaagttatatcctcttcaacgcaaagtcgtatctgaagtagtttctaatatgaggaaaatgatcgaatcaaaacgtcctctatacatcactcttcacttggcgtgtggatttggtaagactattaccacgtgttatcttatggctacacacggtagaaaaaccgtcatttgcgtacccaataaaatgttaatacatcaatggaagacacaggtagaggcagtcggattggaacataagatatccatagatggagtaagtagtctattaaaggaactaaagactcaaagtccggatgtattaatagtagtcagtagacatctgacaaacgatgccttttgtaaatatatcaataagcattatgatttgttcatcttggatgaatcacatacgtataatctgatgaacaatacagcagttacaagatttttagcgtattatcctccgatgatgtgttattttttaactgctacacctagaccatctaacagaatttattgtaacagtattattaatattgccaagttatccgatctaaaaaaaactatctatgcagtagatagtttttttgagccatattccacagataatattagacatatgataaaacgattagatggaccatctaataaatatcatatatataccgagaagttattatctgtagacgagcctagaaatcaacttattcttaataccctggtagaagaattcaagtcaggaactattaatcgcattttagttattactaaactacgtgaacatatggtattcttctacaaacgattattagattttttcggatcagaggttgtatttataggagacgcccaaaatagacgtactccagatatggtcaaatcaatcaaggaactaaatagatttatattcgtatccaccttattttattccggtactggtttagatattcctagtttggattctttgttcatttgctcggcagtaatcaacaatatgcaaatagagcaattactagggagggtatgtcgagaaacagaactattagataggacggtatatgtatttcctagcacatccatcaaagaaataaagtacatgataggaaatttcgttcaacgaattattagtctgtctgtagataaactaggatttaaacaaaaaagttatcggaaacatcaagaatccgatcccacttctgtatgtacaacatcctccagagaagaacgtgtattaaatagaatatttaactcgcaaaatcgttaagaagtttaagcgacgatccgcatgctgcgcaggccagtgtattacccctcatagtattaatataatccaatgatacttttgtgatgtcggaaatcttaaccaatttagactgacaggcagaacacgtcatgcaatcatcatcgtcatcgataactgtagtcttgggcttctttttgcggctcttcattccggaacgcacattggtgctatccatttaggtagtaaaaaataagtcagaatatgccctatagcacgatcgtgcaaaacctggtatatcgtctctatctttatcacaatatagtgtatcgacatctttattattattgacctcgtttatcttggaacatggaatgggaacatttttgttatcaacggccacctttgccttaattccagatgttgtaaaattataactaaacagtctatcatcgacacaaatgaaattcttgtttagacgtttgtagtttacgtatgcggctcgttcgcgtctcattttttcagatattgcaggtactataatattaaaaataagaatgaaataacataggattaaaaataaagttatcatgacttctagcgctgatttaactaacttaaaagaattacttagtctgtacaaaagtttgaaattttcagattctgcggctatagaaaagtataattctttggtagaatggggaacatctacttactggaaaataggcgtgcaaaaggtagctaatgtcgagacgtcaatatctgattattatgatgaggtaaaaaataaaccgtttaatattgatccgggctattacattttcttaccggtatattttgggagcgtctttatttattcgaagggtaaaaatatggtagaacttggatctggaaactcttttcaaataccagatgatatgcgaagtgcgtgtaacaaagtattagacagcgataacggaatagactttctgagatttgttttgttaaacaatagatggataatggaagatgctatatcaaaatatcagtctccagttaatatatttaaactagctagtgagtacggattaaacatacccaaatatttagaaattgaaatagaggaagacacattatttgacgacgagttatactctattatagaacgctctttcgatgataaatttccaaaaatatccatatcgtatattaagttgggagaacttaggcggcaagttgtagactttttcaaattctcattcatgtatattgagtccatcaaggtagatcgtataggagataatatttttattcctagcgttataacaaaatcaggaaaaaagatattagtaaaagatgtagaccatttaatacgatccaaggttagagaacatacatttgtaaaagtaaaaaagaaaaacacattttccattttatacgactatgatggaaacggaacagaaactagaggagaagtaataaaacgaattatagacactataggacgagactattatgttaacggaaagtatttctctaaggttggtagtgcaggcttaaagcaattgactaataaattagatattaatgagtgcgcaactgtcgatgagttagttgatgagattaataaatccggaactgtaaaacgaaaaataaaaaaccaatcagcatttgatttaagcagagaatgtttgggatatccagaagcggattttataacgttagttaataacatgcggttcaaaatagaaaattgtaaggttgtaaatttcaatattgaaaatactaattgtttaaataacccgagtattgagactatatatggaaactttaaccagttcgtctcaatctttaatatcgtcaccgatgtcaaaaaaagattattcgagtgaaataatatgcgcctttgatataggtgcaaaaaatcctgccagaactgttttagaagtcaaggataactccgttagggtattggatatatcaaaattagactggagttctgattgggaaaggcacatagctaaagatttgtcacaatatgaatacactacagttcttctagaacgtcagcctagaaggtcgccgtacgtcaaatttatctattttattaaaggctttttatatcatacatcggctgccaaagttatttgcgtctcgcctgtcatgtctggtaattcatatagagatcgaaaaaagagatcggtcgaagcatttcttgattggatggacacattcggattgcgagactccgttccggatagacgcaaattagacgatgtagcggatagtttcaatttggctatgagatacgtattagataaatggaatactaattatacaccttataataggtgtaaatctagaaattacataaaaaaaatgtaataacgttagtaacgccattatggataatctatttacctttctacatgaaatagaagatagatatgccagaactatttttaactttcatctaataagttgcgatgaaataggagatatatatggtcttatgaaagaacgcatttcctcagaggatatgtttgataatatagtgtataataaagatatacatcatgccattaagaaactagtgtattgcgacatccaacttactaaacacattattaatcagaatacgtatccggtatttaacgattcttcacaagtgaaatgttgtcattatttcgatataaactcagataatagcaatattagctctcgtacagtagagatatttgagagggaaaagtcatctcttgtatcatatattaaaactaccaataagaagagaaaggtcaattatggggaaataaagaaaactgtacatggaggcactaatgcaaattacttttccggtaaaaagtctgatgagtatctgagcactacagtcaggtccaacattaatcaaccttggatcaaaaccatttctaagagaatgagagtagatatcattaatcactctatagtaacgcgtggaaaaagctctatattacaaactatagaaattatttttactaatagaacatgtgtgaaaatattcaaggattctactatgcacattattctatccaaggacaaggatgaaaaggggtgtatacacatgattgacaaattattctatgtctattataatttatttctgttgttcgaggatatcatccaaaacgagtactttaaagaagtagctaatgttgtaaaccacgtactcacggctacggcattagatgagaaattattcctaattaagaaaatggctgaacacgatgtttatggagttagcaatttcaaaatagggatgtttaacctgacatttattaagtcgttggatcataccgttttcccctctctgttagatgaggatagcaaaataaagttttttaaggggaaaaagctcaatattgtagcattacgatctctggaggattgtataaattacgtgactaaatccgagaatatgatagaaatgatgaaggaaagatcgactattttaaatagcatagatatagaaacggaatcggtagatcgtctaaaagaattgcttctaaaatgaaaaaaaaacactaattcagaaatggatcaacgactcggatataagtttttggtgcctgatcctaaagccggagttttttatagaccgttacatttccaatatgtatcgtattctaattttatattgcatcgattgcatgaaatcttgaccgtcaagcggccactcttatcgtttaagaataatacagaacgaattatgatagaaattagcaatgttaaagtgactcctccagattactcacctataatcgcgagtattaaaggtaagagttatgacgcattagccacgttcactgtaaatatctttaaagaggtaatgaccaaagagggtatatccatcactaaaataagtagttatgagggaaaagattctcatttgataaaaattccgctactaataggatacgggaataaaaatccacttgatacagccaagtatcttgttcctaatgtcataggtggagtctttatcaataaacaatctgtcgaaaaagtaggaattaatctagtagaaaagattacaacatggccaaaatttagggttgttaagccaaactcattcactttctcgttttcctccgtatcccctcctaatgtattaccgacaagatatcgccattacaagatatctctggatatatcacaattggaagcgttgaatatatcatcgacaaagacatttataacggtcaatattgttttgctgtctcaatatttatctagagtgagtctagaattcattagacgtagtttatcatacgatatgcctccagaagttgtctatctagtaaacgcgataatagatagtgctaaacgaattactgaatctattactgactttaatattgatacatacattaatgacctggtggaagctgaacacattaaacaaaaatctcagttaacgatcaacgagttcaaatatgaaatgctgcataactttttacctcatatgaactatacacccgatcaactaaagggattttatatgatatctttactaagaaagtttctctactgtatctaccacacttctagatatccagatagagattcgatggtttgtcatcgcatcctaacgtacggcaaatattttgagacgttggcacatgatgaattagagaattacataggcaacatccgaaacgatatcatgaacaatcacaagaacagaggcacttacgcggtaaacattcatgtactaacaactcctggacttaatcatgcattttctagtctattgagtggaaagttcaaaaagtcagacggtagttatcgaacacatcctcactattcatggatgcagaatatttctattcctaggagtgttggattttatccggatcaagtaaagatttcaaagatgttttctgtcagaaaataccatccaagtcaatatctttacttttgttcatcggacgttccggaaagaggtcctcaggtaggtttagtatctcaattgtctgtcttgagttccattacaaatatactaacgtctgagtatttggatttggaaaagaaaatttgtgagtatatcagatcatattataaagatgatataagttactttgaaacaggatttccaatcactatagaaaatgctctagtcgcatctcttaatccaaatatgatatgtgattttgtaactgactttagacgtagaaaacggatgggattcttcggtaacttggaggtaggtattactttagttagggatcacatgaatgaaattcgcattaatattggagcgggaagattagtcagaccattcttggttgtggataacggagagctcatgatggatgtgtgtccggagttagaaagcagattagacgacatgacattctctgacattcagaaagagtttccgcatgtcatcgaaatggtagatatagaacaatttacttttagtaacgtatgtgaatcggttcaaaaatttagaatgatgtcaaaggatgaaagaaagcaatacgatttatgtgactttcctgccgaatttagagatggatatgtagcatcttcactagtgggaatcaatcacaattctggacccagagctattcttggatgtgctcaagctaaacaagctatctcttgtctgagctcggatatacgaaataaaatagacaatggaattcatttgatgtatccagagaggccaatcgtgattagtaaggctttagaaacttcaaagattgcggctaattgcttcggccaacatgttactatagcattaatgtcgtacaaaggtatcaatcaagaggatggaattatcatcaaaaaacaatttattcagagaggcggtctcgatattgttacagccaagaaacatcaagtagaaattccgttggaaaactttaataacaaagaaagagataggtctaacgcctattcaaaattagaaagtaatggattagttagactgaatgctttcttggaatccggagacgctatagcacgaaatatctcatcaagaactcttgaagatgattttgctagagataatcagattagctttgatgtttccgaaaaatataccgatatgtacaaatctcgcgttgaacgagtacaagtagaacttactgacaaagttaaggtacgagtattaaccatgaaagaaagaagacccattctaggagacaaatttaccactagaacgagtcaaaagggaacagtcgcgtatatcgcggatgaaacggaacttccatacgatgaaaatggtatcacaccagatgtcattattaattctacatccatcttctctagaaaaactatatctatgttgatagaggttattttaacagccgcatattctgctaagccgtacaacaataagggagaaaaccgacctgtctgttttcctagtagtaacgaaacatccatcgatacatatatgcaattcgctaaacaatgttatgagcattcaaatccgaaattgtctgatgaagaattatcggataaaatcttttgtgaaaagattctctatgatcctgaaacggataagccttatgcatccaaagtattttttggaccaatttattacttgcgtctgaggcatttaactcaggacaaggcaaccgttagatgtagaggtaaaaagacgaagctcattagacaggcgaatgagggacgaaaacgtggaggaggtatcaagttcggagaaatggagagagactgtttaatagcgcatggtgcagccaatactattacagaagttttgaaagattcggaagaagattatcaagatgtgtatgtttgtgaaaattgtggagacatagcagcacaaatcaagggtattaatacatgtcttagatgttcaaaacttaatctctctcctctcttaacaaaaattgataccacgcacgtatctaaagtatttcttactcaaatgaacgccagaggcgtaaaagttaaattagatttcgaacgaaggcctccttcgttttataaaccattagataaagttgatctcaaaccgtcttttctggtgtaatattctagtttggtagtagatacatatcaatatcatcaaattcgagatccgaattataaaatgggcgtggattgttaactatagaatcggacgtctgatattcgaaaatctgtggagttttaggttttggtggaggtgtaactgctacttgggatactgaagtctgatattcagaaagctgggggatgttctggttcgacatccaccgatggtgtcacatcactaatcggttcggtaacgtctgtggacgatggaggcaccacttctacaggttctggttctttatcctcagtcatcaacggagctacttcaatgcgaggaaatgtataatttggtaatggtttctcatgtggatctgaagaagaggtaagatatctactagaaagataccgatcacgttctagttctcttttgtagaacttaactttttctttctccgcatctagttgatattccaacctcttcacgttcgcatgggttacctccgcagtttttacgagcgatttcacgttcagccttcatgcgtcttatagcatgaattcgcttatcgttatcgggtttagcttctgtcaccttagcaattccttttttattaaactctacataatcatatccatttctattgtttgttctaatataaacgagtatagcatcattgctaaatttttcaatagtatcgaaaacagaatatcctaaaccatataatatatattcaggaacactcaaactaaatgtccaggattctcctaaatacgtaaactttaatagtgcgaaatcattcaaaaatctaccacttatagatagatagatagtacataaatgcgtatagtagtctacctatctctttattatgaaaaccggcattacgatcatatatgtcgtgatatacctgtgatccgtttacgttaaaccataaatacatgggtgatcctataaacatgaatttatttctaattctcagagctatagttaattgaccgtgtaatatttgcttacatgcatacttgatacgatcattaataagatttttatcattgctcgttatttcagaatcgtatatataaggagtaccatcgtgattcttaccagatattatacaaaatactatatataaaatatattgacccacgttagtaatcatgtaaatgtttaacgttttaaattttgtattcaatgatccattatcatacgctagcatggtcttatgatattcattctttaaaatataatattgtgttagccattgcattggggctcctaatggagattttttattctcatccattttaggataggctttcataaagtccctaataacttcgtgaataatgtttctatgttttctactgatgcatgtatttgcttcgatttttttatcccatgtttcatctatcatagatttaaacgcagtaatgctcgcaacattaacatcttgaaccgttggtacaattccgttccataaatttataatgttcgccatttatataactcattttttgaatatacttttaattaacaaaagagttaagttactcatatggacgccgtccagtctgaacatcaatctttttagccagagatatcatagccgctcttagagtttcagcgtgattttccaacctaaatagaacttcatcgttgcgtttacaacacttttctatttgttcaaactttgttgttacattagtaatctttttttccaaattagttagccgttgtttgagagtttcctcattgtcgtcttcatcggctttaacaattgcttcgcgtttagcctctggctttttagcagccgttgtagaaaaaaattcagttgctggaattgcaagatcgtcatctccggggaaaagagttccgtccatttaaagtacagattttagaaactgacactctgcgttatttatatttggtacaacacatggattataaatattgatgttaataacatcagaaaatgtaaagtctatacattgttgcatcgtgttaaattttctaatggatctagtattattgggtccaacttctgcctgaaatccaaatatggaagcggatacaaaaccgtttcctggataaaccacacatctccacttttgctttacatcagaaattgtgtcgttgacatcttgaactctcctatctaatgccggtgttccacctatagattttgaatattcgaatgctgcatgagtagcattaaattccttaatattgccataattttcatatattgagtaaccctggataaaaagtaaacacaccgcagccgtagctaccacaataaaaaaaattgatagagagttcatttataatctattagaagctgacaaaatttttttacacgcatcagacaatgctttaataaatagttcaacatctacttttgtcatatcgaaccgatggtatgattctaacctagaattacatccgaaaaagttgactatgttcatagtcattaagtcattaacaaacaacattccagactctggattataagacgatactgtttcgtcacaattacctaccttaatcatgtgattatgaatattggctattagagcaccttctaagaaatctataatatctttgaaacacgatttaaaatcaaaccacgaatatacttctacgaagaaagttagtttacccataggagaaataactataaatggagatctaaatacaaaatccggatctatgatagttttaacattattatattctctattaaatacctccacatctaaaaatgttaattttgaaactatgtcttcgtttattaccgtacctgaactaaacgctataagctctattgtttgagaactctttaaacgatattcttgaaatacatgtaacaaagtttcctttaactcggtcggtttatctaccatagttacagaatttgtatccttatctataatataataatcaaaatcgtataaagttatataattatcgcgttcagattgggatcttttcaaatagactaaaaaccccatttctctagtaagtatcttatgtatatgtttgtaaaatatcttcatggtgggaatatgctctaccgcagttagccattcctcattgacagcggtagatgtattagacaaaactattccaatgtttaacaagggccattttacgagattattaaatccttgtttgataaatgtagccaatgagggttcgagttcaacgacgattgaattctcttcccgcggatgctgcatgatgaacgacgggatgttgttcgattgatttggaattctttttcgactttttgtttatattaaatattttaaaatttatagcggatagcaattcatgtaccacggataatgtagacgcgtattgcgcatcgatatctttattattagataaatttatcaataaatgtgagaagtttgcctcgttaaggtcttccatttaaatattatataaacatttgtgtttgtatcttattcgtcttttatggaatagttttttactagtaaagctgcaattacacactttgtccgtaaaacataaatataaacaccagcttttatcaatcgttccaaaaagtcgacggcggacatttttaacatggcatctattttaaatacacttaggtttttggaaaaaacatcattttataattgtaacgattcaataactaaagaaaagattaagattaaacataagggaatgtcatttgtattttataagccaaagcattctaccgttgttaaatacttgtctggaggaggtatatatcatgatgatttggttgtattggggaaggtaacaattaatgatctaaagatgatgctattttacatggatttatcatatcatggagtgacaagtagtggaacaatttacaaattgggatcgtctatcgatagactttctctaaataggactattgttacaaaagttaataattataattatgatacattttttgacgatgatgattgatcgctattgcacaattttgtttttttactttctaatatagcgtttagattctttttcatgtgcgaatattgatttactaaaatatctatgtttaacttttgttctataacgtccttatcggcggtatcggtacatatacgtaattcaccttcacaaaatacggagtcttcgataataatagccaatcgattattggatctagctgtctgtatcatattcaacatgtttaatatatcctttcgtttcccctttacaggcatcgatcgtagcatattttccgcgtctgagatggaaatgttaaaactacaaaaatgcgtaatgttagcccgtcctaatattggtacgtgtctataagtttggcatagtagaataatagacgtgtttaaatgccttccaaagtttaagaattctattagagtattgcattttgatagtttatcgcctacatcatcaaaaataagtaaaaagtgtgctgattttttatgattttgtgcgacagcaatacatttttctatgttacttttagttcgtatcagattatattctagagattcctgactactaacgaaattaatatgatttggccaaatgtatccatcataatctggattataaacgggtgtaaacaagaatacatgtttatattttttaactagtgtagaaaacagagatagtaaatagatagtttttccagatccagatcctcccgttaaaaccattctaaacggcatttttaataaattttctcttgaaaattgtttttcttggaaacaattcataattatatttacagttactaaattaatttgataataaatcaaaatatggaaaactaaggtcgttagtagggaggagaacaaagaaggcacatcgtgacataaataacatttattatcatgatgacaccagaaaacgacgaagagcagacatctgtgttctccgctactgtttacagagacaaaattcagggaaagaataaacgcaaacgcgtgattggtctatgtattagaatatctatggttatttcactactatctatgattaccatgtccgcgtttctcatagtgcgcctaaatcaatgcatgtctgctaacgaggctgctattactgacgccgctgttgccgttgctgctgcatcatctactcatagaaaggttgcgtctagcactacgcaatatgatcacaaagaaagctgtaatggtttatattaccagggttcttgttatatattacattcagactaccagttattctcggatgctaaagcaaattgcactgcggaatcatcaacactacccaataaatccgatgtcttgactacctggctcattgattatgttaaggatacatggggatctgatggtaatccaattacaaaaactacatccgattatcaagattctgatgtatcacaagaagttagaaagtatttttgtgttaaaacaatgaactaatatttatttttgtacattaataaatgaaatcgcttaatagacaaactgtaagtaggtttaagaagttgtcggtgccggtcgctataatgatgatactctcaaccattattagtggcataggaacatttctgcattacaaagaagaactgatgcctagtgcttgcgccaatggatggatacaatacgataaacattgttatttagatactaacattaaaatgtctacagataatgcggtttatcagtgtcgtaaattacgagccagattgcctagaccggatactagacatctgagagtattgtttagtattttttataaagattattgggtaagtttaaaaaagaccaatgataaatggttagatattaataatgataaagatatagatattagtaaattaacaaattttaaacaactaaacagtacgacggatgctgaagcgtgttatatatacaagtctggaaaactggttaaaacagtatgtaaaagtactcaatctgtactatgtgttaaaaaattctacaagtgacaacaaaaaatgaattaataataagtcgttaacgtacgccgccatggacgccgcgtttgttattactccaatgggtgtgttgactataacagatacattgtatgatgatctcgatatctcaatcatggactttataggaccatacattataggtaacataaaaactgtccaaatagatgtacgggatataaaatattccgacatgcaaaaatgctactttagctataagggtaaaatagttcctcaggattctaatgatttggctagattcaacatttatagcatttgtgccgcatacagatcaaaaaataccatcatcatagcatgcgactatgatatcatgttagatatagaagataaacatcagccattttatctattcccatctattgatgtttttaacgctacaatcatagaagcgtataacctgtatacagctggagattatcatctaatcatcaatccttcagataatctgaaaatgaaattgtcgtttaattcttcattctgcatatcagacggcaatggatggatcataattgatgggaaatgcaatagtaattttttatcataaaagttgtaaagtaaataataaaacaataaatattgaactagtagtacgtatattgagcaatcagaaatgatgctggtacctcttatcacggtgaccgtagttgcgggaacaatattagtatgttatatattatatatttgtaggaaaaagatacgtactgtctataatgacaataaaattatcatgacaaaattaaaaaagataaagagttctaattccagcaaatctagtaaatcaactgatagcgaatcagactgggaggatcactgtagtgctatggaacaaaacaatgacgtagataatatttctaggaatgagatattggacgatgatagcttcgctggtagtttaatatgggataacgaatccaatgttatggcgcctagcacagaacacatttacgatagtgttgctggaagcacgctgctaataaataatgatcgtaatgaacagactatttatcagaacactacagtagtacttaatgaagataccaaacagaatcctaactattcatccaatcctttcgtaaattataataaaaccagtatttgtagcaagtcaaatccgttcattacagaactcaacaataaatttagtgagaataatccgtttagacgagcacatagcgatgattatcttaataagcaagaacaagatcatgaacacgatgatatagaatcattggtgtgattagtttcctttttataaaattgaagtaatatttagtattattgctgccgtcacgttgtacaaatggagatattccctgtattcggcatttctaaaattagcaattttattgctaataatgactgtagatattatatagatacagaacatcaaaaaattatatctgatgagatcaatagacagatggatgaaacggtacttcttaccaacatcttaagcgtagaagttgtaaatgacaatgagatgtaccatcttattcctcatagattatcgacgattatactctgtattagttctgtcggaggatgtgttatctctatagataatgacgtcaatggcaaaaatattctaacctttcccattgatcatgctgtaatcatatccccactgagtaaatgtgtcgtagttagcaagggtcctacaaccatattggttgttaaagcggatatacctagcaaacgattggtaacatcgtttacaaacgacatactgtatgtaaacaatctatcactgattaattattcgccgttgtctgtattcattattagacgagttaccgactatttggatagacacatatgcgatcagatatttgcgaataataagtggtattccattataaccatcgacaataagcagtttcctattccatcaaactgtataggtatgtcctctgccaagtacataaattctagcatcgagcaagatactttaatacatgtttgtaacctcgagcatccattcgacttagtatacaaaaaaatgcagtcgtacaattctgtacctatcaaggaacaaatattgtacggtagaattgataatataaatatgagcattagtatttctgtggattaatagatttctagtatggggatcattaatcatctctaatctctaaatacctcataaaacgaaaaaaaagctattatcaaatactgtacggaatggattcattctcttctctttttatgaaactctgttgtatatctactgataaaactggaagcaaaaaatctgataaaaagaataagaataagatcaaggattattataaaataacaatagttcctggttcctcttccacgtctactagctcgtggtattatacacatgcctagtaatagtctctttgcgttgacggaaagcagactagaaataacaggctaaaatgttcagacaccataatagttcccaacccagataataacagagtaccatcaacacattcctttaaactcaatcccaaacccaaaaccgttaaaatgtatccggccaattgatagtagataatgaggtgtacagcgcatgatgatttacacagtaaccaaaatgaaaatactttagtaattataagaaatatagatggtaacgtcatcatcaacaatccaataatatgccggagagtaaacattgacggataaaacaaaaatgctccgcataactctatcatggcaataacacaaccaaatacttgtaagattcctaaattagtagaaaatacaacggatatcgatgtataagtgatctcgagaaataataagaataaagtaatgcccgtaaagataaacatcaacattgtttggtaatcattaaaccaattagtatgaagttgaactaatttcacagtagattttattccagtattatccccgcatgtataagtacctggtaagatatctttatattccataatcaatgagacatcactatctgataacgaatgaagtctagcactagtatgccatttacttaatattgtcgtcttggaagttttattataagttaaaatatcatggttatccaatttccatctaatatactttgtcggattatctatagtacacggaataatgatggtatcattacatgctgtatactctatggtctttgtagttgttataacaaccaacgtatagaggtatatcaacgatattctaactcttgacattttttatttatttaaaatgatacctttgttatttattttattctattttgctaacggtattgaatggcataagtttgaaacgagtgaagaaataatttctacttacttattagacgacgtattatacacgggtgttaatggggcggtatacacattttcaaataataaactaaacaaaactggtttaactaataataattatataacaacatctataaaagtagaggatgcggaaccaataacggaaatcccaaatgttggaaaatagacggttcagacgacccaaaacatagaggtagaggatacgctccttatcaaaatagcaaagtaacgataatcagtcacaacggatgtgtactatctgacataaacatatcaaaagaaggaattaaacgatggagaagatttgacggaccatgtggttatgatttatacacggcggataacgtaattccaaaagatggtttacgaggagcattcgtcgataaagatggtacttatgacaaagtttacattcttttcactgatactatcggctcaaagagaattgtcaaaattccgtatatagcacaaatgtgcctaaacgacgaaggtggtccatcatcattgtctagtcatagatggtcgacgtttctcaaagtcgaattagaatgtgatatcgacggaagaagttatagacaaattattcattctagaactataaaaacagataatgatacgatactatatgtattcttcgatagtccttattccaagtccgcattatgtacctattctatgaataccattaaacaatctttttctacgtcaaaattggaaggatatacaaagcaattgccgtctccagctcctggtatatgtttaccagctggaaaagttgttccacataccacgtttgaagtcatagaaaaatataatgtactagatgatattataaagcctttatctaaccaacctatcttcgaaggaccgtctggtgttaaatggttcgatataaaggagaaggaaaatgaacatcgggaatatagaatatacttcataaaagaaaattctatatattcgttcgatacaaaatctaaacaaactcgtagctcgcaagtcgatgcgcgactattttcagtaatggtaacttcgaaaccgttatttatagcagatatagggataggagtaggaatgccacaaatgaaaaaaatacttaaaatgtaatcttaatcgagtacaccgcacgacaatgaacaaacataagacagattatgctggttatgcttgctgcgtaatatgcggtctaattgttggaattatttttacagcgacactattaaaagttgtagaacgtaaattagttcatacaccatcaatagataaaacgataaaagatgcatatattagagaagattgtcctactgactggataagctataataataaatgtatccatttatctactgatcgaaaaacctgggaggaaggacgtaatgcatgcaaagctctaaatccaaattcggatctaattaagatagagactccaaacgagttaagttttttaagaagcattagacgcggatattgggtaggagaatccgaaatattaaaccagacaaccccatataattttatagctaaaaatgccacgaagaatggaactaaaaaacggaaatatatttgtagtacaacgaatactcccaaactacatttttatcataccactacttcggttagatgttttagaaaaaaataaatatcgccgtaccgttcttgtttttataaaaataacaattaacaattatcaaattttttctttaatattttacgtggttgaccattcttggtggtaaaataatctcttagtgttggaatggaatgctgtttaatgtttccgcactcatcgtatattttgacgtatgcagtcacatcgtttacgcaatagtcagactgtagttctatcatgcttcctacatcagaaggaggaacagttttaaagtctcttggttttaatctattgccattagttttcatgaaatcctttgttttatccacttcacattttaaataaatgtccactatacattcttctgttaattttactagatcgtcatgggtcatagaatttataggttccgtagtccatggatccaaactagcaaacttcgcgtatacggtatcgcgattagtgtatacaccaactgtatgaaaattaagaaaacagtttaataaatcaacagaaatatttaatcctccgtttgatacagatgcgccatatttatggatttcggattcacacgttgtttgtctgaggtgttcgtctagtgttgcttctacgtaaacttcgattcccatatattctttattgtcagaatcgcataccgatttatcatcatacactgtttgaaaactaaatggtatacacatcaaaataataaataataacgagtacattctgcaatattgttatcgtaattggaaaaatagtgttcgagtgagttggattatgtgagtattggattgtatattttattttatattttatattttgtagtaagaatagaatgctaatgtcaagtttattccaatagatgtcttattaaaaaacatatataataaataacaatggctgaatggcataaaattatcgaggatatctcaaaaaataataagttcgaggatgccgccatcgttgattacaagactacaaagaatgttctagctgctattcctaacagaacatttgccaagattaatcctctcatcactaatcgtaatattctaaaacctcttattggtcagaaatattgtattgtatatactaactctctaatggatgagaacacgtatgctatggagttgcttactgggtacgcccctgtatctccgatcgttatagcgagaactcataccgcacttatatttttgatgggtaagccaacaacatccagacgtgacgtgtatagaacgtgtagagatcacgctacccgtgtacgtgcaactggtaattaaaataaaaagtaatattcatatgtagtgtcaattttaaatgatgatgatgaaatggataatatccatattgacgatgtcaataatgccggtattggcatacagttcatcgatttttagatttcattcagaggatgtggaattatgttatgggcatttgtattttgataggatctataatgtagtaaatataaaatataatccgcatattccatatagatataattttattaatcgcacgttaaccgtagatgaactagacgataatgtcttttttacacatggttattttttaaaacacaaatatggttcacttaatcctagtttgattgtctcattatcaggaaacttaaaatataatgatatacaatgctcagtaaatgtatcgtgtctcattaaaaatttggcaacgagtacatctactatattaacatctaaacataagacttattctctacatcggtccacgtgtattactataataggatacgattctattatatggtataaagatataaatgacatctatgattttactgcaatatgtatgctaatagcgtctacattgatagtgaccatatacgtgtttaaaaaaataaaaatgaactcttaattatgctatgctattagaaatggataaaatcaaaattacggttgattcaaaaattggtaatgttgttaccatatcgtataacttggaaaagataactattgatgtcacacctaaaaagaaaaaagaaaaggatgtattattagcgcaatcagttgctgtcgaagaggcaaaagatgtcaaggtagaagaaaaaaatattatcgatattgaagatgacgatgatatggatgtagaaagcgcataatacgatctataaaaataagtatataaatactttttatttactgtactcttactgtgtagtggtgataccctactcgattatttttttaaaaaaaaatacttattctgattcttctagccatttccgtgttcgttcgaatgccacatcgacgttaaagataggggagtagttgaaatctagttctgcattgttggtacgcacctcaaatgtagtgttggatatcttcaacgtatagttgttgagtagtgatggttttctaaatagaattctcttcatatcattcttgcacgcgtacatttttagcatccatcttggaatcctagatccttgttctattcccaatggtttcatcaatagaagattaaacatatcgtacgaacacgatggagagtaatcgtagcaaaagtaagcatttcctttaatctcagatcccggatactggatatattttgcagccaacacgtgcatccatgcagcatttcctacatatacccggctatgtaccgcgttatcatcgactgtacgatacataatgttaccgtgttgcttacattgctcgtaaaagactttcatcaatttgtctccttctccgtaaattccagtgggtcttaggcaacaagtatacaattttgctccattcatgattacggaattattggctttcataaccagttgctcggccatacgtttactttttgcgtatacatgtcctggtgatatatcataaagggtatgctcatggccgatgaatggatcaccgtgtttattgggtcctattgcttccatgctactagtatagatcaaatacttgattcctaggtccacacaagctgccaatatagtctgtgttccataatagtttactttcatgatttcattatcggtgtattttccaaatacatccactagagcagctgtatgaataatcagatttaccccatctagcgcttctcttaccttatcaaagtcgtttatatcacattgtatatagtttataaccttaactttcgaggttattggttgtggatcttctacaatatctatgactctgatttcttgaacatcatctgcactaattaacagttttactatatacctgcctagaaatccggcaccaccagtaaccgcgtacacggccattgctgccactcataatatcagactacttattctattttactaaataatggctgtttgtataatagaccacgataatatcagaggagttatttactttgaaccagtccatggaaaagataaagttattggattaaaatccggaacgtatagtttgataattcatcgttacggagatattagtcaaggatgtgattccataggcagtccagaaatatttatcggtaacatctttgtaaacagatatggtgtagcatatgtttatttagatacagatgtaaatatatctacaattattggaaaggcgttatctatttcaaaaaatgatcagagattagcgtgtggagttattggtatttcttacataaatgaaaagataatacattttcttacaattaacgagaatggcgtttgatatatcagttaatgcgtctaaaacaataaatgcattagtttacttttctactcagcaaaataaattagtcatacgtaatgaagttaatgatacacactacactgtcgaatttgatagggacaaagtagttgacacgtttatttcatataatagacataatgactccatagagataagaggggtgcttccagaggaaactaatattggttgcgcggttaatacgccggttagtatgacttacttgtataataagtatagttttaaactgattttagcagaatatataagacacagaaatactatatccggcaatatttattcggcattgatgacactagatgatttggctattaaacagtatggagacattgatctattatttaatgagaaacttaaagtagactccgattcgggactatttgactttgtcaactttgtaaaggatatgatatgttgtgattctagaatagtagtagctctatctagtctagtatctaaacattgggaattgacaaataaaaaatataggtgtatggcattagccgaacatatatctgatagtattccaatatctgagctatctagactacgatacaatctatgtaagtatctacgcgggcacactgagagcatagaggatgaatttgattattttgaagacgatgattcgtctacatgttctgccgtaaccgacagggaaacggatgtataattttttttatagcgtgaaggatatgataaaaaatataattgttgtatttatcccattccaatcaccttatatgattctgtaacacaatgaaggagtcttatagatgtatagaggtcagatactggtttgataaactgtttattccacataagtatgtttgactttatggttagacccgcatactttaacaaatcactgaaaattggagttaggtattgacctctcagaatcagttgccgttctggaacattaaatgtattttttatgatatactccaacgcatttatgtgggcatacaacaagtcattactaatggagtattccaagagaagagatttcaacagactgtttatgaactcgaatgccgcctcattgtcgcttatattgatgatgtcgaattctcccaatatcatcaccgatgagtagctcatcttgttatcgggatccaagttttctaaagatgtcattaaaccctcgatcatgaatggatttatcatcatcgtttttatgttggacatgagcttagtccgtttgtccacatctatagacgacgatttctgaattatttcatatatccctctctttaactccaggaacttgtcaggatggtctactttaatatgttctcgtctaagagatgaaaatctttggatggttgcacgcgacttttctctaaaggatcctctcttaaatgaatccatcttatccttggacaagatggacagtctattttccttagatggtttaatatttttgttacccatgatctataaaggtagacctaatcgtctcggatgaccatatatttattttcagttttattatacgcataaattgtaaaaaatatgttaggtttacaaaaatgtctcgtggggcattaatcgtttttgaaggattggacaaatctggaaaaacaacacaatgtatgaacatcatggaatctataccggcaaacacgataaaatatcttaactttcctcagagatccactgtcactggaaagatgatagatgactatctaactcgtaaaaaaacctataatgatcatatagttaatctattattttgtgcaaatagatgggagtttgcatcttttatacaagaacaactagaacagggaattactttaatagttgatagatacgcattctctggagtagcgtatgccgccgctaaaggcgcgtcaatgactctcagtaagagttatgaatctggattgcctaaacccgacttagttatattcttggaatctggtagcaaagaaattaatagaaacgtcggcgaggaaatttatgaagatgttacattccaacaaaaggtattacaagaatataaaaaaatgattgaagaaggagatattcattggcaaattatttcttctgaattcgaggaagatgtaaagaaggagttgattaagaatatagttatagaggctatacacacggttactggaccagtggggcaactgtggatgtaatagtgaaattacattttttataaatggatgaagcatattactctggcaacttggaatcagtactcggatacgtgtccgatatgcataccgaactcgcatcaatatctcaattagttattgccaagatagaaactatagataatgatatattaaacaaggacattgtaaattttatcatgtgtagatcaaacttggataatccatttatctctttcctagatactgtatatactattatagatcaagagatctatcagaccgaattgattaattcattagacgacaatgaaattatcgattgtatagttaacaagtttatgagcttttataaggataacctagaaaatatagtagatgctatcattactctaaaatatataatgaataatccagattttaaaactacgtatgccgaagtactcggttccagaatagcggatatagatattaaacaagtgatacgtgagaatatactacaattgtctaataatatccgcgaacgatatttgtgaaaatattaaaaaaaaatactttttttattaaatgacgtcgcttcgcgaatttagaaaattatgctgtgatatatatcacgcatcaggatataaagaaaaatctaaattaattagagactttataacagatagggatgataaatatttgatcattaagctattgcttcccggattagacgatagaatttataacatgaacgataaacaaattataaaattatatagtataatatttaaacaatctcaggaagatatgctacaagatttaggatacggatatataggagacactattaggactttcttcaaagagaacacagaaatccgtccacgagataaaagcattttaactttagaagaagtggatagttttttaactacgttatcatccgtaactaaagaatcgcatcaaataaaattattgactgatatcgcatccgtttgtacatgtaatgatttaaaatgtgtagtcatgcttattgataaagatctaaaaattaaagcgggccctcggtacgtacttaacgctattagtcctcatgcctatgatgtgtttagaaaatctaataacttgaaagagataatagaaaatgcatctaaacaaaatctagactctatatctatttctgttatgactccaattaatcccatgttagcggaatcgtgtgattctgtcaataaggcgtttaaaaaatttccatcaggaatgtttgcggaagtcaaatacgatggtgaaagagtacaagttcataaaaataataacgagtttgccttctttagtagaaacatgaaaccagtactctctcataaagtggattatctcaaagaatacataccgaaagcatttaaaaaagctacgtctatcgtattggattctgaaattgttcttgtagacgaacataatgtaccgctcccgtttggaagtttaggtatacacaaaaagaaagaatataaaaactctaacatgtgtttgttcgtgtttgactgtttgtactttgatggattcgatatgacggacattccattgtacgaacgaagatcttttctcaaagatgttatggttgaaatacccaatagaatagtattctcagagttgacgaatattagtaacgagtctcagttaactgacgtattggatgatgcactaacgagaaaattagaaggattggtcttaaaagatattaatggagtatacgaaccgggaaagagaagatggttaaaaataaagcgagactatttgaacgagggttccatggcagattctgccgatttagtagtactaggtgcttactatggtaaaggagcaaagggtggtatcatggcagtctttctaatgggttgttacgacgatgaatccggtaaatggaagacggttaccaagtgttcaggacacgatgataatacgttaagggagttgcaagaccaattaaagatgattaaaattaacaaggatcccaaaaaaattccagagtggttagtagttaataaaatctatattcccgattttgtagtagaggatccaaaacaatctcagatatgggaaatttcaggagcagagtttacatcttccaagtcccataccgcaaatggaatatccattagatttcctagatttactaggataagagaggataaaacgtggaaagaatctactcatctaaacgatttagtaaacttgactaaatcttaatagttacatacaaattaaaataacactatttagttggtggtcgccatggatggtgttattgtatactgtctaaacgcgttagtaaaacatggcgaggaaataaatcatataaaaaatgatttcatgattaaaccatgttgtgaaaaagtcaagaacgttcacattggcggacaatctaaaaacaatacagtgattgcagatttgccatatatggataatgcggtatccgatgtatgcaattcactgtataaaaagaatgtatcaagaatatccagatttgctaatttgataaagatagatgacgatgacaagactcctactggtgtatataattattttaaacctaaagatgccattcctgttattatatccataggaaaggatagagatgtttgtgaactattaatctcatctgataaagcgtgtgcgtgtatagagttaaattcatataaagtagccattcttcccatggatgtttccttttttaccaaaggaaatgcatcattgattattctcctgtttgatttctctatcgatgcggcacctctcttaagaagtgtaaccgataataatgttattatatctagacaccagcgtctacatgacgagcttccgagttccaattggttcaagttttacataagtataaagtccgactattgttctatattatatatggttgttgatggatctgtgatgcatgcaatagctgataatagaacttacgcaaatattagcaaaaatatattagacaatactacaattaacgatgagtgtagatgctgttattttgaaccacagattaggattcttgatagagatgagatgctcaatggatcatcgtgtgatatgaacagacattgtattatgatgaatttacctgatgtaggcgaatttggatctagtatgttggggaaatatgaacctgacatgattaagattgctctttcggtggctggtatttggaaagttttataggtagttgatagaacaaaatacataattttgtaaaaataaatcactttttatactaatatgacacgattaccaatacttttgttactaatatcattagtatacgctacaccttttcctcagacatctaaaaaaataggtgatgatgcaactttatcatgtaatcgaaataatacaaatgactacgttgttatgagtgcttggtataaggagcccaattccattattcttttagctgctaaaagcgacgtcttgtattttgataattataccaaggataaaatatcttacgactctccatacgatgatctagttacaactatcacaattaaatcattgactgctagagatgccggtacttatgtatgtgcattctttatgacatcgcctacaaatgacactgataaagtagattatgaagaatactccacagagttgattgtaaatacagatagtgaatcgactatagacataatactatctggatctacacattcaccggaaactagttctgagaaacctgattatatagataattctaattgctcgtcggtattcgaaatcgcgactccggaaccaattactgataatgtagaagatcatacagacaccgtcacatacactagtgatagcattaatacagtaagtgcatcatctggagaatccacaacagacgagactccggaaccaattactgataaagaagaagatcatacagttacagacactgtctcatacactacagtaagtacatcatctggaattgtcactactaaatcaaccaccgatgatgcggatctttatgatacgtacaatgataatgatacagtaccatcaactactgtaggcggtagtacaacctctattagcaattataaaaccaaggactttgtagaaatatttggtattaccgcattaattatattgtcggccgtggcaatattctgtattacatattatatatataataaacgttcacgtaaatacaaaacagagaacaaagtctagatttttgacttacataaatgtctgggatagtaaaatctatcatattgagcgggccatctggtttaggaaagacagccatagccaaaagactatgggaatatatttggatttgtggtgtcccataccactagatttcctcgtcctatggaacgagaaggtgtcgattaccattacgttaacagagaggccatctggaagggaatagccgccggaacatactgagtttttaggaaatatttacggaacttctaaaactgctgtgaatacagcggctattaataatcgtatttgtgtgatggatctaaacatcgacggtgttagaagttttaaaaatacttacctaatgccttactcggtgtatataagacctacctctcttaaaatggttgagaccaagcttcgttgtagaaacactgaagcggatgatgagattcatcgtcgtgtgatgttggcaaaaactgacatggatgaggcaggtgaagccggtctattcgacactattatcattgaagatgatgtgaatttagcatatagtaagttaattcagatactacaggaccgtattagaatgtattttaacactaattagagacttaagacttaaaacttgataattaataatataactcgtttttatatgtggctatttcaacgtctaatgtattagttaaatattaaaacttaccacgtaaaacttaaaatttaaaatgatatttcattgacagatagatcacacattatgaactttcaaggacttgtgttaactgacaattgcaaaaatcaatgggtcgttggaccattaataggaaaaggtggatttggtagtatttatactactaatgacaataattatgtagtaaaaatagagcccaaagctaacggatcattatttaccgaacaggcattttatactagagtacttaaaccatccgttatcgaagaatggaaaaaatctcacaatataaagcacgtaggtcttatcacgtgcaaggcatttggtctatacaaatccattaatgtggaatatcgattcttggtaattaatagattaggtgcagatctagatgcggtgatcagagccaataataatagattaccaaaaaggtcggtgatgttgatcggaatcgaaatcttaaataccatacaatttatgcacgagcaaggatattctcacggagatattaaagcgagtaatatagtcttggatcaaatagataagaataaattatatctagtggattacggattggtttctaaattcatgtctaatggcgaacatgttccatttataagaaatccaaataaaatggataacggtactctagaatttacacctatagattcgcataaaggatacgttgtatctagacgtggagatctagaaacacttggatattgtatgattagatggttgggaggtatcttgccatggactaagatatctgaaacaaagaattgtgcattagtaagtgccacaaaacagaaatatgttaacaatactgcgactttgttaatgaccagtttgcaatatgcacctagagaattgctgcaatatattaccatggtaaactctttgacatattttgaggaacccaattacgacaagtttcggcacatattaatgcagggtgtatattattaagtgtggtgtttggttgatgtaaaatttttgtcgataaaaattaaaaaataacttaatttattattgatctcgtgtgtacaaccgaaatcatggcgatgttttacgcacacgctctcggtgggtacgacgagaatcttcatgcctttcctggaatatcatcgactgttgccaatgatgtcagtttataataacaagtatgacattgtaaaagacaaatatatgtggtgttacagtcaggtgaacaagagatatattggagcactgctgcctatgtttgagtgcaatgaatatctacaaattggagatccgatccatgatcaagaaggaaatcacatatcgccacaaaaactactatgctctaagcggaatcgggtacgagagtctagacttgtgtttggaaggagtagggattcatcatcacgtacttgaaacagaaaacgctgtatatggaaaagttcaacatgattattctactatcaaagagaaggccaaagaaatgaatgcactcagttcaggacctatcatcgattaccacgtctggataggagattgtatctgtcaagttactgctgtggacgtacatggaaaggaaattatgagaatgagattcaaaaagggtgcggtgcttccgatcccaaatctggtaaaagttaaacttggggagaatgatacagaaaatctttcttctactatatcggcggcaccatcgaggtaaccacctctctggaagacagtgtgaatcatgtactcatgaaacgtttggaatctatacgccatatgtggtctgttgtatatgatcattttgatattgtgaatggtaaagaatgctgttatgtgcatacgcatttgtctaatcaaaatcttataccgagtactgtaaaaacaaatttgtacatgaagactatgggatcatgcattcaaatgagtatcttagcgaactgaaggaatcaggtggatggagtcccagaccagaaatgcaggaatttgaatatccagatggagtggaagacactgaatcaattgagagattggtagaggagttcttcaatagatcagaacttcaggctggtaaatctattaatgttaaacatacatctgtttcagctaagcaactaagaacacgtatactctcatcttttgccaacacagagggtggatatttgttcattggagttgataataatacacacaaagtatttggattcacggtgggttacgactacctcagactgatagagaatgatatagaaaagcatatcaaaagactttgtgttgtgtatttctgtgagaagaaagaggacatcaagtacacgtgtcgattcatcaaggtatataaacctggggatgaggctacctcgacatacgtgtgcgctatcaaagtggaaagatgctgttgtgctgtgtttgcagattggccagaatcatggtatcaagaagtattctccagatgaataggtgtcacatataaaattttaattaatgtaactatagagaacaaataataggttgtaatatcatatagacaataactaacaattaattagtaactgttatctctttttaactaactaactatacctattaatacatcgtaattatagttcttaacatctattaatcattgattcgcttctttaattttttataaaccaacattgttaattgaaaagggataacatgttacagaatataaattatatatggattttttttaaaaaggaaatacttgactggagtgtatatttatctcttcattatatagcacgcgtgttttccaatttttccacatcccatataatacaggattataatctcgttcgaacatacgagaaagtggataaaacaatagttgattttttatctaggttgccaaatttattccatattttagaatatggggaaaatattctacatatttattctatggatgatgctaatacgaatattataattttttttctagatagagtattaaatattaataagaacgggtcatttatacacaatctcaggttatcatcatccattaatataaaagaatatgtatatcaattagttaataatgatcatccagataataggataagactaatgcttgaaaatggacgtagaacaagacattttttgtcctatatatcagatacagttaatatctatatatgtattttatatagatgccgaagacagttacggttgtacattattacatagatgtatatatcactataagaaatcagaatcagaatcagaatcatacaatgaattaattaagatattgttaaataatggatcagatgtagataaaaaagatacgtacggaaacacaccttttatcctattatgtaaacacgatatcaacaacgtggaattgtttgagatatgtttagagaatgctaatatagactctgtagactttaatagatatacacctcttcattatgtctcatgtcgtaataaatatgattttgtaaagttattaatttctaaaggagcaaatgttaatgcgcgtaataaattcggaactactccattttattgtggaattatacacggtatctcgcttataaaactatatttggaatcagacacagagttagaaatagataatgaacatatagttcgtcatttaataatttttgatgctgttgaatctttagattatctattatccagaggagttattgatattaactatcgtactatttacgacgctgtcagttataatgcgtataatacgttggtctatctattaaacagaaatggtgattttgagacgattactactagtggatgtacatgtatttcggaagcagtcgcaaacaacaacaaaataataatggaagtactattgtctaaacgaccatctttgaaaattatgatacagtctatgatagcaattactaaacataaacagcataatgcagatttattgaaaatgtgtataaaatatactgcgtgtatgaccgattatgatactcttatagatgtacaatcactacagcaatataaatggtatattttaagatgtttcgatgaaatagatatcatgaagagatgttatataaaaaataaaactgtattccaattagttttttgtatcaaagacattaatactttaatgagatacggtaaacatccttctttcgtgaagtgcactagtctcgacgtatacggaagtcgtgtacgtaatatcatagcatctattagatatcgtcagagattaattagtctattatccaagaagctggatcctggagataaatggtcgtgttttcctaacgaaataaaatataacgataacgaactgtccacatatctaaaaatcttataaacactattaaaatataaaatcacactacatcattgtttccttttagtgctcgacagtgtatactatttttaacgctcataaataaaaatgaaaacgatttccgttgttacgttgttatgcgtactacctgctgttgtttattcaacatgtactgtacccactatgaataacgctaaattaacgtctaccgaaacatcgtttaataataaccagaaagttacgtttacatgtgatcagggatatcattcttcggatccaaatgctgtctgcgaaacagataaatggaaatacgaaaatccatgcaaaaaaatgtgcacagtttctgattacatctctgaactatataataaaccgctatacgaagtgaattccaccatgacactaagttgcaacggcgaaacaaaatattttcgttgcgaagaaaaaaatggaaatacttcttggaatgatactgttacgtgtcctaatgcggaatgtcaacctcttcaattagaacacggatcgtgtcaaccagttaaagaaaaatactcatttggggaatatataactatcaactgtgatgttggatatgaggttattggtgcttcgtacataagttgtacagctaattcttggaatgttattccatcatgtcaacaaaaatgtgatataccgtctctatctaatggattaatttccggatctacattttctatcggtggcgttatacatcttagttgtaaaagtggttttatactaacgggatctccatcatccacatgtatcgacggtaaatggaatcccatactcccaacatgtgtacgatctaacgaaaaatttgatccagtggatgatggtcccgacgatgagacagatttgagcaaactctcgaaagacgttgtacaatatgaacaagaaatagaatcgttagaagcaacttatcatataatcatagtggcgttaacaattatgggcgtcatatttttaatctccgttatagtattagtttgttcctgtgacaaaaataatgaccaatataagttccataaattgctaccgtgaatataaatccgttaaaataatgaataattaataattaataatttaataacaaacaagtatcaaaagattaaagacttatagctagaatcaattgagatgtcttcttcagtggatgttgatatctacgatgccgttagagcatttttactcaggcactattataacaagagatttattgtgtatggaagaagtaacgccatattacataatatatacaggctatttacaagatgcgccgttataccgttcgatgatatagtacgtactatgccaaatgaatcacgtgttaaacaatgggtgatggatacacttaatggtataatgatgaatgaacgcgatgtttctgtaagcgttggcaccggaatactattcatggaaatgtttttcgattacaataaaaatagtatcaacaatcaactaatgtatgatataattaatagcgtatctataattctagctaatgagagatatagaagcgcttttaacgacgatggtatatacatccgtagaaatatgattaacaagttgtacggatacgcatctctaactactattggcacgatcgctggaggtgtttgttattatctgttgatgcatctagttagtttgtataaataattatttcaatatactagttaaaattttaagattttaaatgtataaaaaactaataacgtttttatttgtaataggtgcattagcatcctattcgaataatgagtacactccgtttaataaactgagtgtaaaactctatatagatggagtagataatatagaaaattcatatactgatgataataatgaattggtgttaaattttaaagagtacacaatttctattattacagagtcatgcgacgtcggatttgattccatagatatagatgttataaacgactataaaattattgatatgtctactattcaacgcagaggtcacacgtgtagaatatctaccaaattatcatgccattatgataagtacccttatattcacaaatatgatggtgatgagcgacaatattctattactgcagagggaaaatgctataaaggaataaaatatgaaataagtatgatcaacgatgatactctattgagaaaacatactcttaaaattggatctacttatatatttgatcgtcatggacatagtaatacatattattcaaaatatgatttttaaaaatttaaaatatattatcacttcagtgacagtagtcaaataacaaacaacaccatgagatatattataattctcgcagttttgttcattaatagtatacacgctaaaataactagttataagtttgaatccgtcaattttgattccaaaattgaatggactggggatggtctatacaatatatcccttaaaaattatggcatcaagacgtggcaaacaatgtatacaaatgtaccagaaggaacatacgacatatccgcatttccaaagaatgatttcgtatctttctgggttaaatttgaacaaggcgattataaagtggaagagtattgtacgggaccaccgactgtaacattaactgaatacgacgaccatccgtatgctactagaggtagcaaaaagattcctatttacaaacgcggtgacatgtgtgatatctacttgttgtatacggctaacttcacattcggagattctaaagaaccagtaccatatgatatcgatgactacgattgcacgtctacaggttgcagcatagactttgtcacaacagaaaaagtgtgcgtgacagcacagggagccacagaagggtttctcgaaaaaattactccatggagttcgaaagtatgtctgacacctaaaaagagtgtatatacatgcgcaattagatccaaagaagatgttcccaatttcaaggacaaaatggccagagttatcaagagaaaatttaactaaatttctcggtagcacatcaaatgatgttaccacttttcttagcatgcttaacttgactaaatattcataactaatttttattaatgatacaaaaacgaaataaaactgcatattatacactggttaacgcccttataggctctaaccattttcaagatgaggtccctgattatagtccttctgttcccctctatcatctactccatgtctattagacgatgtgagaagactgaagaggaaacatggggattgaaaatagggttgtgtataattgccaaagatttctatcccgaaagaactgattgcagtgttcatctcccaactgcaagtgaaggcaatggattcagggatatacgaaacaccgataaattataaaaaaagcaatgtgtccgctgtttccgttaataatactattttcgtaactggcggattattcataaataactctaatagcacgatcgtggttaacaatatggaaaaacttgacatttataaagacaaacaatggtcgattatagaaatgcctatggctagggtatatcacggcatcgactcgacatttggaatgttatattttgccggaggtctatccgttaccgaacaatatggtaatttagagaaaaacaacgagatatcttgttacaatcctagaacgaataagtggtttgatatttcatatactatttataagatatccatatcatcattgtgtaaactaaataacgtcttctatgtatttagtaaggacattggatatgtggaaaagtatgatggtctccccgctataaaggcattatcaacttctccttattgattgaaaatgaaaatataaatagtttttatgtatagcagtattaccctatagttttattgcttactactaacatggatacagatacagatgttacaaatgtagaagatatcatgaatgaaatagatagagagaaagaagaaatactaaaaaatgtagaaattgaaaataataaaaacattaacaagaatcatcccaatgaatatattagagaagcactcgttattaatacaagtagtaatagtgattccattgataaagaagttatagaatgtatcagtcacgatgtaggaatatagatcatatctactaatttttataatcaatacaaaacataaaaaacaactcgttattacatagcaggcatggaatccttcaagtattgttttgataacgatggcaagaaatggattatcggaaatactttatattctggtaattcaatactctataaggtcagaaaaaatttcactagttcgttctacaattacgtaatgaagatagatcacaaatcacacaagccattgttgtctgaaatacgattctatatatctgtattggatcctttgactatcgacaactggacacgggaacgtggtataaagtatttggctattccagatctgtatggaattggagaaaccgatgattatatgttcttcgttataaagaatttgggaagagtattcgccccaaaggatactgaatcagtcttcgaagcatgcgtcactatgataaacacgttagagtttatacactctcgaggatttacccatggaaaaatagaaccgaggaatatactgattagaaataaacgtctttcactaattgactattctagaactaacaaactatacaagagtggaaactcacatatagattacaacgaggacatgataacttcaggaaatatcaattatatgtgtgtagacaatcatcttggagcaacagtttcaaaacgaggagatttagaaatgttgggatattgcatgatagaatggttcggtggcaaacttccatggaaaaacgaaagtagtataaaagtaataaaacaaaaaaaagaatataaaaaatttatagctactttctttgaggactgttttcctgaaggaaatgaacctctggaattagttagatatatagaattagtatacacgttagattattctcaaactcctaattatgacagactacgtagactgtttatacaagattgaaatattctttttttatagagtgtggtagtgttacggatatctaatattaatattagactatctctatcgcgctacacgaccaatatcgattactatggatatcttctatgaaaggagagaatgtattcatttctccagcgtcaatctcgtcagtattgacaatactgtattatggagctaatggatccactgctgaacagctatcaaaatatgtagaaaaggaggagaacacggataaggttagcgctcagaatatctcattcaaatccatgaataaagtatatgggcgatattctgccgtgtttaaagattcctttttgagaaaaattggcgataagtttcaaactgttgacttcactgattgtcgcactatagatgcaatcaacaagtgtgtagatatctttactgaggggaaaatcaatccactattggatgaacaattgtctcctagcaattagtgccgtatactttaaagcaaaatggttgacgccattcgaaaaggaatttaccagtgattatcccttttacgtatcaccaacggaaatggtagacgtaagtatgatgtctatgtacggcgagctatttaatcacgcatctgtaaaagaatcattcggtaacttttcaatcatagaactgccatatgttggagatactagtatgatggtcattcttccagacaagattgatggattagaatccatagaacaaaatctaacagatacaaattttaagaaatggtgtaactctctggaagctacgtttatcgatgttcacattcccaagtttaaggtaacaggctcgtataatctggtggatactctagtaaagtcaggactgacagaggtgttcggttcaactggagattatagcaatatgtgtaatttagatgtgagtgtcgacgctatgatccacaaaacgtatatagatgtcaatgaagagtatacagaagcagctgcagcaacttgtgcactggtgtcagactgtgcatcaacaattacaaatgagttctgtgtagatcatccgttcatctatgtgattaggcatgttgatggaaaaatttttttcgttggtagatattgctctccgacaactaattgttaaccattttttttaaaaaaatagaaaaaacatgtggtattagtgcaggtcgttattcttccaattgcaattggtaagatgacggccaactttagtacccacgtcttttcaccacagcactgtggatgtgacagactgaccagtattgatgacgtcaaacaatgtttgactgaatatatttattggtcgtcctatgcataccgcaacaggcaatgcgctggacaattgtattccacactcctctcttttagagatgatgcggaattagtgttcatcgacattcgcgagctggtaaaaaatatgccgtgggatgatgtcaaagattgtgtagaaatcatccgttgttatataccggatgagcaaaaaaccatcatcggactttgtgcatatgctgctacttactggggaggtgaagaccatcccactagtaacagtctgaacgcattgtttgtgatgcttgagatgctaaattacgtggattataacatcatattccggcgtatgaattgatgagttgtacatcttgacattttcttctttcttctcttctccctttcccagaaacaaactttttttacccactataaaataaaatgagtatactacctgttatatttctttctatatttttttattcttcattcgttcagacttttaacgcgcctgaatgtatcgacaaagggcaatattttgcatcattcatggagttagaaaacgagccagtaatcttaccatgtcctcaaataaatacgctatcatccggatataatatattagatattttatgggaaaaacgaggagcggataatgatagaattataccgatagataatggtagcaatatgctaattctgaacccgacacaatcagactctggtatttatatatgcattaccacgaacgaaacctactgtgacatgatgtcgttaaatttgacaatcgtgtctgtctcagaatcaaatatagatcttatctcgtatccacaaatagtaaatgagagatctactggcgaaatggtatgtcccaatattaatgcatttattgctagtaacgtaaacgcagatattatatggagcgggcatcgacgccttagaaataagagacttaaacaacggacacctggaattattaccatagaagatgttagaaaaaatgatgctggttattatacatgtgttttagaatatatatacggtggcaaaacatataacgtaaccagaattgtaaaattagaggtacgggataaaataataccttctactatgcaattaccagaaggtgttgtaacttcaataggtagtaatttgactattgcgtgtagagtatcgttgagacctcccacaacggatgcagacgtcttttggataagtaatggtatgtattacgaagaagatgatggggacggagacggtagaataagtgtagcaaataaaatctatatgaccgataagagacgtgttattacatcccggttaaacattaatcctgtcaaggaagaagatgctacaacgtttacgtgtatggcgtttactattcctagcatcagcaaaacagttactgttagtataacgtgaatgtatgttgttacatttccatgtcaattgagtttataagaatttttatacattatcttccaacaaacaattgacgaacgtattgctatgattaactcccacgatactatgcatattattaatcattaacttgcagactatacctagtgctattttgacatactcatgttcttgtgtaattgcggtatctatattattaaagtacgtaaatctagctatagttttattatttaattttagataatataccgtctccttatttttaaaaattgccacatcctttattaaatcatgaatgggaatttctatgtcatcgttaatatattgtgaacaacaagagcagatatctataggaaagggtggaatgcgatacattgatctatgtagttttaaaacacacgcgaactttgaagaatttatataaatcattccatcgatacatccttctatgttgacatgtatatatccaggaattcttttattaatgtcaggaaatgtataaactaaaacattgcccgaaagcggtgcctctatctgcgttatatccgttcttaacttacaaaatgtaaccaatacctttgcatgacttgttttgttcggcaacgttagtttaaacttgacgaatggattaattacaatagcatgatccgcgcatctattaagtttttttactttaacgcccttgtatgtttttacagagactttatctaaatttctagtgcttgtatgtgttataaatataacgggatatagaactgaatcacctaccttagatacccaattacattttatcagatccagataataaacaaattttgtcgccctaactaattctatattgttatatattttacaattggttatgatatcatgtaataacttggagtctaacgcgcatcgtcgtacgtttatacaattgtgatttagtgtagtatatctacacatgtatttttccgcactatagtattctggactagtgataaaactatcgttatatctgtcttcaatgaactcatcgagatattgctctctgtcatattcatacacctgcataaactttctagacatcttacaatccgtgttattttaggatcatatttacatatttacgggtatatcaaagatgttagattagttaatgggaatcgtctataataatgaatattaaacaattatatgaggacttttaccacaaagcatcataaaaatgagtcgtcgtctgatttatgttttaaatatcaaccgcgaatcaactcataaaatacaagagaatgaaatatatacatattttagtcattgcaatatagaccatacttctacagaacttgattttgtagttaaaaactatgatctaaacagacgacaacctgtaactgggtatactgcactacactgctatttgtataataattactttacaaacgatgtactgaagatattattaaatcatggagtggatgtaacgatgaaaaccagtagcggacgtatgcctgtttatatattgcttactagatgttgtaatatttcacatgatgtagtgatagatatgatagacaaagataaaaaccacttatcgcatagagactattccaacctactactagagtatataaaatctcgttacatgttattgaaggaagaggatatcgatgagaacatagtatccactttattagataagggaatcgatcctaactttaaacaagacggatatacagcgttacattattattatttgtgtctcgcacacgtttataaaccaggtgagtgtagaaaaccgataacgataaaaaaggccaagcgaattatttctttgtttatacaacatggagctaatctaaacgcgttagataattgtggtaatacaccattccatttgtatcttagtattgaaatgtgtaataatattcatatgactaaaatgctgttgacttttaatccgaatttcaaaatatgtaataatcatggattaacgcctatactatgttatataacttccgactacatacaacacgatattcttgttatgttaatacatcactatgaaacaaatgttggagaaatgccgatagatgagcgtcgtataatcgtattcgagtttatcaaaacatattctacacgtccggcagattcgataacttatttgatgaataggtttaaaaatatagatatttatacccgctatgaaggaaagacattattacacgtagcatgtgaatataataatacacacgtaatagattatcttatacgtatcaacggagatataaatgcgttaaccgacaataacaaacacgctacacaactcattatagataacaaagaaaattccccatataccattaattgtttactgtatatacttagatatattgtagataagaatgtgataagatcgttggtggatcaacttccatctctacctatcttcgatataaaatcatttgagaaattcatatcctactgtatacttttagatgacacattttacaatagacacgttaggaatcgcaattctaaaacgtatcgatacgcattttcaaaatacatgtcgtttgataaatacgatggtataataactaaatgtcataaagaaacaatattgctcaaactatccactgttctagacactacactatatgcagttttaagatgccataattcgaaaaagttaagaagatacctcaacgagttaaaaaaatataataacgataagtcctttaaaatatattctaatattatgaatgagagataccttaatgtatattataaagatatgtacgtgtcaaaggtatatgataaactatttcctgttttcacagataaaaattgtctactaacattactaccttcagaaattatatacgaaatattatacatgctgacaattaacgatctttataatatatcgtatccacctaccaaagtatagttgtatttttctcatgcgatgtgtgtaaaaaaactgatattatataaatattttagtgccgtataatgaagatgacgatgaaaatgatggtacatatatatttcgtatcattattgttattgctattccacagttacgccatagacatcgaaaatgaaatcacagaattcttcaataaaatgagagatactctaccagctaaagactctaaatggttgaatccagcatgtatgttcggaggcacaatgaatgatatagccgctctaggagagccattcagcgcaaagtgtcctcctattgaagacagtcttttatcgcacagatataaagactatgtggttaaatgggagaggctagaaaaaaatagacggcgacaggtttctaataaacgtgttaaacatggtgatttatggatagccaactatacatctaaattcagtaaccgtaggtatttgtgtaccgtaactacaaagaatggtgactgtgttcagggtatagttagatctcatattaaaaaacctccttcatgcattccaaaaacatatgaactaggtactcatgataagtatggcatagacttatactgtggaattctttacgcaaaacattataataatataacttggtataaagataataaggaaattaatatcgacgatattaagtattcacaaacgggaaagaaattaattattcataatccagagttagaagatagtggaagatacaactgttacgttcattacgacgacgttagaatcaagatgtaaaatacttacggttataccgtcgcaagaccacaggtttaaactaatactagatccaaaaatcaacgtaacgataggagaacctgccaatataacatgcactgctgtgtcaacgtcattattgattgacgatgtactgattgaatgggaaaatccatccggatggcttataggattcgattttgatgtatactctgttttaactagtagaggcggtatcaccgaggcgaccttgtactttgaaaatgttactgaagaatatataggtaatacatataaatgtcgtggacacaactattattttgaaaaaacccttacaactacagtagtattggagtaaatacacaatgcatttttatatacattactgaataattattattattatttatatcgtatttgtgctataacgcgactatctaggtatttgtatctcaccgatagagaacatataaatgtagactctattaaacagttgtgtaaaatatcagatcctaatagatgtggatgtacggctttagaaatgagttcattaaaatatgtgatatcaacggaacatatttatataattatactattgctgttagtataattattgattccacggaagaactaccaacagttactccaattacaacaacatataattatactatcgatgatagcactactgaagaactacaagtgactcctcatatggatctccatcgatgatacatgtattaaaatactttccgaataagtcttttaaatattgtattaattatgaaaaactatgctatgcgagtatgatacgatactagattttatctctagcgagagatgtcgttagaatcatttatcaacgaatatcgataacatgtgtcatttatacgttaaagtctgtccgtcttctctattgtttagactgtttgtagaatgctgtgatataaacaaactagtagacacaaatatttaactcatgatgaagttgagaatgatatgctttagctaatataaaaatatattaatccactatatattctagacttgatttaaaaccgataaactactactacgtactgtataagttaggagcagaccctaattatgtagatgatagaggtaatacttctgcatctatatgtccacttatgagaaaacgtcatttaataagatgcatcgtgaaaagaaatttattaaagagttggtaaaatatgaaaccgaaagtaaataatataggaaatacacctctacataactacgtatctcaatatgatatcactctcattcctcatccacaacccattaaaaaatggaaattaaagccctctattagcataaacggctacaggtctacctttacaatggcctttccttgtgcccagttcagaccctgtcattgccacgctactaaggactccctgaataccgtggccgacgtcagacattgtctgactgaatacatcctgtgggtttctcatagatggacccatagagaaagcgcagggtctctctacaggcttctcatctctttcagaactgatgcaacggagctctttggtggtgagttgaaggattcacttccgtggagatcattaaatgactccatgaaaaccgccgaagaacttcgtgcaatcattggactttgtactcaatcagctatcgtctctggaagagtcttcaacgataagtatatcgacatactacttatgctgcgaaagattctgaacgagaacgactatctcaccctcttggatcatatccgcactgctaaatactaaatctccttcatgctctctcactacactttttatcatcttatgaggaataattagcaccagaatagctatggattgcacatgtattctatgtcgtctactggatgaagatgtgacgtacaaaaaaataaaactagaaattgaaacgtgtcacaacttatcaaaacatatagatagacgaggaaacaatgcgctacattgttacgtctccaataaatgcgatacagacattaagattgttcgactgttactctctcgcggagtcgagagactttgtagaaacaacgaaggattaactccgctaggagcatacagtaagcatagatacgtaaaatctcagattgtgcatctactgatatccagctattcgaattcctctaacgaactcaagtcgaatataaatgatttcgacttacgtctgctaaaatacctaattgtggataaacggatacgtccgtccaagaatacgaattatgcaatcaatggtctcggattggtggatatatacgtaacgacgcctaatccgagaccagaagtattgctatggcttcttaaatcagaatgttacagcaccggttacgtatttcgtacctgtatgtacaacagtgatatgtgtaagaactctcttcattactatatatcgtctcatagagaatctctatccaaggatgtaattaaatgtttgatcgataacaatgtttccatccaatactactggtcttgctcaaccatagatatagagattattaataaaggatgtggacacgtgtagagtatacgacgtcagccctatattagaggcgtattatctaaacaagcgatttagagtaaccccatataatgtagacatggaaatcgttaatcttcttattgagagacgtcatactcttgtcgacgtaatgcgtagtattacttcgtacgattccagagaatataaccactacatcatcgataacattctaaagagatttagacaacaggatgaatccatcgtacaagccatactgataaactacttacattacggcgatatggtaagtatacctatcattcaatgcatgttggataagacgacggacaacaactttgttaataataatctcgtcgatgtaaacgtcgtaaggtttatcgtggaaaatatggacacgcggctgtaaatcacatatctaacaatggccgtctatgtatgtacggtctgatattatcgagatttaataattgcgggtatcactgttatgaagatgtatttgatatactaagcaagtacatggatgatatagatatgatcgataactctactatattacgcggtcgatgtcaataatatacaatttgcaaagcggttattggaatatggagcgagtgtcacgctcgataatcaatacggccatccagaaaagcagttaccaaagagaagctagttgatttattactgagttaccatcccactctagagactatgattgacgcatttaatagagatatacgctatctatatcctgaaccattattcgcctgtatcagatacgccttaatcctagatgatgattttccttctaaagtaagtatgatatcgccggtcgtcataaggaactaaagcgctatagagcagacattaatagaatgaagaatgcctacatatcaggcgtctccatgtttgatatattatttaaacgaagcaaacgccacagattgagatacgcaaagaacaatgagaggatcgactccattaaataatttatcatggagtgataatgtcctgtttccatggcatattacaaaatcgattccgtccaagatgataaaaacatttaccggcatcataaacacggagtttattttatatgtctcgcataaacattactaaaaaaatatattgttcggttttctttcacatctttaattatgaaaaagtaaatcattatgagatggacgcatcgttcgcgacagtatgtggtacatacctaacgtatttatggacgacggtaagaatgaaggtcacgtttctgtcaacaatgtcgacgcgatcgtgtaacacgactcacaatagaatctgtgaatgctctcccgatcatggatgcaaggcatgtgtttcccaaacaaaatgtggaataggatacggagtatccggagacgtcatctgttctccgtgtggtctcggaacatattctcacaccgtctcttccgcagataaatgcgaacccgtacccagaaatacctttaactatatcgatgtggaaattaacctgtatccagttaacgacacatcgtgtactcggacgaccactaccggtctcagcgaatccatctcaacgtcggaactaactattactatgaatcataaagactgcgatcccgtcttcttaataaggtagcgacttcaggtttctttacaggagaaaggtgtgcactctgaatttcgagattaaatgcaataacaaagattcttcctccaaacagttaacgaaagcaaagaatgatactatcatgccgcattcggagacagtaactctagcgtcgacatctatatactatatagtaataccaatactcaagactacgaaactgatacaatctcttatcatgtgggtaatgtagccatatgcccggtagttgcgatatacataaactgatcactaattccaaacccacccgctttttatagtaagtttttcacccataaatacaataattaatttctcgtaaaagtagaaaatatattctaatttattgcacggtaaggaagtagaatcataaagaacagtactcaatcaatagcaatcatgaaacaatatatcgtactggcatgcatgtgcctgccagtcttcagcaatcatcctcatcgtgtacggaagaagaaaacaaacatcatatgggaatcgatgttattatcaaagtcacaaagcaagaccaaacaccgaccgatgataagatttgccaatccgtaacggaaattacagagtccgagtcagatccagatcccgaggtggaatcagtcgaggatgtagatcctcctaccacttattactccatcatcggtggaggtctgagaatgaactttggattcaccaaatgtcctcagattaaatccatctcagaatccgctgatggaaagactgtgaggtgtctatcgacatcagatgtagcgaagaagagaaagacagcgacatcaagacccatccagtactcgggtctaacatctctcataagaaagtgagttacgaagatatcatcggttcaacgatcgtcgatacaaaatgtgtcaagaatctagagtttagcgttcgtatcggagacatgtgcaaggaatcatctgaacttgaggtcaagtatgtcgacggatcggcatctgaaggtgcaaccgatgatacttcactcatcgattcaacaaaactcaaagcgtgtgtctgaatcgataactctattcatctgaaattggatgagtagggttaatcgaacgattcaggcacaccacgaattaaaaaagtgtaccggacactatattccggtttgcaaaacaaaaagttacctctcgcgacttcttctttttctgtctcaatagtgtgatacgattatgacactattcctatttcctttcagggtatcacaaaaatattaaacctctttctgatggtctcatacaaaaatatttttattctctttctctctttgatggtctcataaaaaatatttttattctctttctctctttgatggtctcataaaatatttttattctctttctctctttgatggtctcataaaaaatatttttattctctttctctctttgatggtctcataaaatatttttattctctttctctctttgatggtctcataaaaaatatttttattctctttctctctttgatggtctcataaaaaatattaaacctctttctgatggtgtcactaaaatatttttattctctttctctcttcaatggagtcataaaatatttttattctctttctctcttcgatggtctcacaaaaatattaaacctctttctgatggtgtcactaaaatatttttattctctttctctcttcaatggagtcataaaatatttttattctctttctctctttgatggtctcacaaaaatatttttattctctttctctctttgatggtctcacaaaaatatttttattctctttctctctttgatggtctcacaaaaatatttttattctctttctctctttgatggtctcataaaaaaagttttacaaaaatatttttattctctttctctctttgatggtctcataaaaaaagttttacaaaaatatttttattctctttctctctttgatggtctcataaaaaaagttttacaaaaatatttttattctctttctctctttgatggtctcataaaaaatattaaacctctttctgatggtgtcactaaaatatttttattctcattctctcttcaatggagtcataaaatatttttattctctttctctcttcgatggtctcacaaaaatattaaacctctttctgatggtgtcactaaaatatttttattctcattctctcttcaatggagtcataaaatatttttattctctttctctcttcgatggtctcacaaaaatattaaacctctttctgatggtgtcactaaaatatttttattctcattctctcttcaatggagtcataaaatatttttattctctttctctctttgatggtctcataaaaaaagttttacaaaaatatttttattctctttctctctttgatggtctcataaaaaatattaaacctctttctgatggtgtcactaaaatatttttattctctttctctcttcaatggagtcataaaatatttttattctctttctctcttcgatggtctcacaaaaatattaaacctctttctgatggtgtcactaaaatatttttattctcattctctcttcaatggagtcataaaatatttttattctctttctctctttgatggtctcataaaaaaagttttacaaaaatatttttattctctttctctctttgatggtctcataaaaaaagttttacaaaaatatttttattctctttctctctttgatggtctcataaaaaaagttttacaaaaatatttttattctctttctctctttgatggtctcataaaaaaagttttacaaaaatatttttattctctttctctctttgatggtctcataaaaaatattaaacctctttctgatggtgtcactaaaatatttttattctcattctctcttcaatggagtcataaaatatttttattctctttctctcttcgatggtctcacaaaaatattaaacctctttctgatggtgtcactaaaatatttttattctcattctctcttcaatggagtcataaaatatttttattctctttctctctttgatggtctcataaaaaaagttttacaaaaatatttttattctctttctctctttgatggtctcataaaaaaagttttacaaaaatatttttattctctttctctctttgatggtctcataaaaaaagttttacaaaaatatttttattctctttctctctttgatggtctcataaaaaaagttttacaaaaatatttttattctctttctctctttgatggtctcacaaaaatattaaacctctttctgatggagtcgtaaaaaagttttatctctttctccttcgatggtctcacaaaaatattaaacctctttctgatggagtcgtaaaaaagttttatctctttctctcttcgatggtctcacaaaaatattaaacctctttctgatggagtcgtaaaaaagttttatctctttctctcttcgatggtctcactaaaatattttttattctctttctgatgcatcaactatttcttaaacaataacgtccaacaacatatactcgtcgagcttatcaacatcccctatgcccatctaggttaccagacaattgtatatcataaaataatgtttataatttttacaaaaatatttttattctctttctctctttgatggtctcataaaaaaagttttacaaaaatatttttattctctttctctctttgatggtctcataaaaaatattaaacctctttctgatggtgtcactaaaatatttttattctcattctctcttcaatggagtcataaaatatttttattctctttctctcttcgatggtctcacaaaaatattaaacctctttctgatggtgtcactaaaatatttttattctcattctctcttcaatggagtcataaaatatttttattctctttctctctttgatggtctcataaaaaaagttttacaaaaatatttttattctctttctctctttgatggtctcataaaaaaagttttacaaaaatatttttattctctttctctctttgatggtctcataaaaaaagttttacaaaaatatttttattctctttctctctttgatggtctcataaaaaaagttttacaaaaatatttttattctctttctctctttgatggtctcataaaaaaagttttacaaaaatatttttattctctttctctctttgatggtctcataaaaaaagttttacaaaaatatttttattctctttctctctttgatggtctcataaaaaaagttttacaaaaatatttttattctctttctctctttgatggtctcataaaaaatattaaacctctttctgatggtgtcactaaaatatttttattctctttctctcttcaatggagtcataaaatatttttattctctttctctcttcgatggtctcacaaaaatattaaacctctttctgatggtgtcactaaaatatttttattctcattctctcttcaatggagtcataaaatatttttattctctttctctctttgatggtctcataaaaaaagttttacaaaaatatttttattctctttctctctttgatggtctcataaaaaaagttttacaaaaatatttttattctctttctctctttgatggtctcataaaaaaagttttacaaaaatatttttattctctttctctctttgatggtctcataaaaaaagttttacaaaaatatttttattctctttctctctttgatggtctcataaaaaaagttttacaaaaatatttttattctctttctctctttgatggtctcataaaaaatattaaacctctttctgatggtgtcactaaaatatttttattctctttctctcttcaatggagtcataaaatatttttattctctttctctcttcgatggtctcacaaaaatattaaacctctttctgatggtgtcactaaaatatttttattctctttctctcttcaatggagtcataaaatatttttattctctttctctctttgatggtctcataaaaaaagttttacaaaaatatttttattctctttctctctttgatggtctcataaaaaaagttttacaaaaatatttttattctctttctctctttgatggtctcataaaaaaagttttacaaaaatatttttattctctttctctctttgatggtctcataaaaaaagttttacaaaaatatttttattctctttctctctttgatggtctcataaaaaaagttttacaaaaatatttttattctctttctctctttgatggtctcataaaaaaagttttacaaaaatatttttattctctttctctctttgatggtctcataaaaaaagttttacaaaaatatttttattctctttctctctttgatggtctcataaaaaatattaaacctctttctgatggtgtcactaaaatatttttattctcattttctctttctctcttcaatggagtcataaaatatttttattctctttctctctttgatggtctcataaaaaatattaaacctctttctgatggtgtcactaaaatatttttattctcattctctcttcaatggagtcataaaaaagttttatctctttctctcttcgatggtctcacaaaaatattaaacctctttctgatggagtcgtaaaaaagttttatctctttctctcttcgatggtctcacaaaaatattaaacctctttctgatgcatcaactatttcttaaacaataacgtccaacaacatatactcatcccctatgcccatctaggttaccagacaattgtatatcataaaataatgtttataatttacacgttaaaatcatataataaaacgtagatcgtataatattttttggtatataaatgatctagtaaaatccatgtaggggatactgctcacattttttctttggtacaaaatttcacacaagtttttatacagacaaattcttgtccatatattttaaaacattgacttttgtactaagaaaaatatctagactaactatctctttctctttctctcttcgatggtctttctgatggagtcgtaaaaaagttttatctctttctctcttcgatggtctcacaaaaatattaaacctctttctgatggagtcgtaaaaaagttttatctctttctctcttcgatggtctcacaaaaatattaaacctctttctgatggagtcgtaaaaaagttttatctctttctccttcgatggtctcacaaaaatattaaacctctttctgatggagtcgtaaaaaagttttatctctttctctcttcgatggtctcacaaaaatattaaacctctttctgatggtgtcactaaaatatttttattctctttctctcttcgatggtctcacaaaaatattaaacctctttctgatggagtcgtaaaaaagttttatctctttctccttcgatggtctcacaaaaatattaaacctctttctgatggagtcgtaaaaaagttttatctctttctctcttcgatggtctcacaaaaatattaaacctctttctgatggagtcgtaaaaaagttttatctctttctccttcgatggtctcacaaaaatattaaacctctttctgatggagtcgtaaaaaagttttatctctttctccttcgatggtctcacaaaaatattaaacctctttctgatggagtcgtaaaaaagttttatctctttctccttcgatggtctcacaaaaatattaaacctctttctgatggagtcgtaaaaaagttttatctctttctctcttcgatggtctcacaaaaatattaaacctctttctgatggagtcgtaaaaaagttttatctctttctctcttcgatggtctcacaaaaatattaaacctctttctgatggagtcgtaaaaaagttttatctctttctccttcgatggtctcacaaaaatattaaacctctttctgatagtctctataaagcgattgatttttcttaccctctagagtttcctacggtcgttggtcacacatttttttctagacactaaataaatagtaagattaaattaattataaaattatgtatataatattaattataaaattatgtatatgatttactaactttagttagataaattaataatacataaattttagtatattaatattataaattaataatacataaattttagtatattaatattatattttaaatatttatttagtgtctagaaaaaaaggccggcctagcaggcc

SEQ ID NO: 5 - DNA, 3822 bp, synthetic construct
  source 1..3822: mol_type = other DNA
atgtttgtctttcttgtcttattgccactagtctctagtcagtgtgttaatcttacaaccagaactcaattaccacctgcatacactaattctttcacacgtggtgtttattaccctgacaaagtattcagatcctcagtattacattcaactcaggacttgttcttacctttcttctccaatgttacttggttccatgctatacatgtctctgggaccaatggtactaagaggtttgataaccctgtcctaccatttaatgatggtgtttatttcgcttccactgagaagtctaacataataagaggctggatatttggtactactttagattcgaagacccagtccctacttattgttaataacgctactaatgttgttattaaagtctgtgaatttcaattctgtaatgatccattcttgggtgtttattaccacaagaacaacaagagttggatggaaagtgagttcagagtttattctagtgcgaataattgcactttcgaatatgtctctcagcctttccttatggaccttgaaggtaaacagggtaatttcaagaatcttagggaatttgtgtttaagaatattgatggttatttcaagatatattctaagcacacgcctattaatttagtgcgtgatctccctcagggtttctcggctttagaaccattggtagatttgccaataggtattaacatcactaggtttcaaactttacttgctttacatagaagttatttgactcctggtgattcttcttcaggttggacagctggtgctgcagcttattatgtgggttatcttcaacctaggactttcctattgaaatataatgagaatggaaccattacagatgctgtagactgtgcacttgaccctctctcagaaacaaagtgtacgttgaaatccttcactgtagagaaaggaatctatcaaacttctaactttagagtccaaccaacagaatctattgttagatttcctaatattacaaacttgtgccctttcggtgaagtatttaacgccaccagatttgcatctgtttatgcttggaacaggaagagaatcagcaactgtgttgctgattattctgtcctatataattccgcatcattctccacatttaagtgttatggagtgtctcctactaaattaaatgatctctgctttactaatgtctatgcagattcatttgtaattagaggtgatgaagtcagacaaatcgctccagggcaaactggaaagattgctgattataattataaattaccagatgactttacaggctgcgttatagcttggaattctaacaatcttgattctaaggttggtggtaattataattacctgtatagattgtttaggaagtctaatctcaaacctttcgagagagatatttcaactgaaatctatcaggccggtagcacaccttgtaatggtgttgaaggatttaattgttactttcctttacaatcatatggtttccaacccactaatggtgttggttaccaaccatacagagtagtagtactttcatttgaacttctacatgcaccagcaactgtttgtggacctaagaagtctactaatttggttaagaacaaatgtgtcaatttcaacttcaatggtttaacaggcacaggtgttcttactgagtctaacaagaagtttctgcctttccaacaatttggcagagacattgctgacactactgatgctgtccgtgatccacagacacttgagattcttgacattacaccatgttcatttggtggtgtcagtgttataacaccaggaacaaatacttctaaccaggttgctgttctttatcaggatgttaactgcacagaagtccctgttgctattcatgcagatcaacttactcctacttggcgtgtttattctacaggttctaatgtatttcaaacacgtgcaggctgtttaataggagctgaacatgtcaacaactcatatgagtgtgacatacccattggtgcaggtatatgcgctagttatcagactcagactaattctcctcggcgggcacgtagtgtagctagtcaatccatcattgcctacactatgtcacttggtgcagagaattcagttgcttactctaataactctattgccatacccacaaactttactattagtgttaccacagaaattctaccagtgtctatgaccaagacatcagtagattgtacaatgtacatttgtggtgattcaactgaatgcagcaatctattgttgcaatatggcagtttctgtacacaattaaaccgtgctttaactggaatagctgttgaacaagacaagaacacccaagaagtatttgcacaagtcaaacaaatttacaagacaccaccaattaaagatttcggtggatttaatttctcacaaatattaccagatccatctaaaccaagcaagaggtcatttattgaagatctactattcaacaaagtgacacttgcagatgctggcttcatcaaacaatatggtgattgccttggtgatattgctgctagagacctcatttgtgcacagaagtttaacggccttactgtattgccacctttgctcacagatgaaatgattgctcaatacacttctgcactgttagcgggtacaatcacttctggttggacctttggtgcaggtgctgcattacaaataccatttgctatgcaaatggcttataggtttaatggtattggagttacacagaatgttctctatgagaaccagaaattgattgccaaccaatttaatagtgctattggcaagattcaagactcactttcttccacagcaagtgcacttggtaaacttcaagatgtggtcaaccagaatgcacaagctttaaacacgcttgttaaacaacttagctccaactttggtgcaatttcaagtgtattaaatgatatcctttcacgtcttgacaaagttgaggctgaagtgcaaattgataggttgatcacaggcagacttcaaagtttgcagacatatgtgactcaacaattaattagagctgcagaaatcagagcttctgctaatcttgctgctactaagatgtcagagtgtgtacttggacaatctaagagagttgatttctgtggaaagggctatcatcttatgtccttccctcagtcagcacctcatggtgtagtcttcttgcatgtgacttatgtccctgcacaagagaagaacttcacaactgctcctgccatttgtcatgatggtaaagcacactttcctcgtgaaggtgtctttgtttcaaatggcacacactggtttgtaacacaaaggaatttctatgaaccacaaatcattactacagacaacacatttgtgtctggtaactgtgatgttgtaataggaattgtcaacaacacagtttatgatcctttgcaacctgaattagactcattcaaggaggagttagataaatatttcaagaatcatacatcaccagatgttgatttaggtgacatctctggcattaatgcttcagttgtaaacattcagaaagaaattgaccgcctcaatgaggttgccaagaatttaaatgaatctctcatcgatctccaagaacttggaaagtatgagcagtatatcaaatggccatggtacatttggctaggtttcatagctggcttgattgccatagtaatggtgacaattatgctttgctgtatgaccagttgctgtagttgtctcaagggctgttgttcttgtggatcctgctgcaaatttgatgaagacgactctgagccagtgctcaaaggagtcaaattacattacacataa

SEQ ID NO: 6 - protein, 1273 aa, synthetic construct
MFVFLVLLPLVSSQCVNLTTRTQLPPAYTNSFTRGVYYPDKVFRSSVLHSTQDLFLPFFSNVTWFHAIHVSGTNGTKRFDNPVLPFNDGVYFASTEKSNIIRGWIFGTTLDSKTQSLLIVNNATNVVIKVCEFQFCNDPFLGVYYHKNNKSWMESEFRVYSSANNCTFEYVSQPFLMDLEGKQGNFKNLREFVFKNIDGYFKIYSKHTPINLVRDLPQGFSALEPLVDLPIGINITRFQTLLALHRSYLTPGDSSSGWTAGAAAYYVGYLQPRTFLLKYNENGTITDAVDCALDPLSETKCTLKSFTVEKGIYQTSNFRVQPTESIVRFPNITNLCPFGEVFNATRFASVYAWNRKRISNCVADYSVLYNSASFSTFKCYGVSPTKLNDLCFTNVYADSFVIRGDEVRQIAPGQTGKIADYNYKLPDDFTGCVIAWNSNNLDSKVGGNYNYLYRLFRKSNLKPFERDISTEIYQAGSTPCNGVEGFNCYFPLQSYGFQPTNGVGYQPYRVVVLSFELLHAPATVCGPKKSTNLVKNKCVNFNFNGLTGTGVLTESNKKFLPFQQFGRDIADTTDAVRDPQTLEILDITPCSFGGVSVITPGTNTSNQVAVLYQDVNCTEVPVAIHADQLTPTWRVYSTGSNVFQTRAGCLIGAEHVNNSYECDIPIGAGICASYQTQTNSPRRARSVASQSIIAYTMSLGAENSVAYSNNSIAIPTNFTISVTTEILPVSMTKTSVDCTMYICGDSTECSNLLLQYGSFCTQLNRALTGIAVEQDKNTQEVFAQVKQIYKTPPIKDFGGFNFSQILPDPSKPSKRSFIEDLLFNKVTLADAGFIKQYGDCLGDIAARDLICAQKFNGLTVLPPLLTDEMIAQYTSALLAGTITSGWTFGAGAALQIPFAMQMAYRFNGIGVTQNVLYENQKLIANQFNSAIGKIQDSLSSTASALGKLQDVVNQNAQALNTLVKQLSSNFGAISSVLNDILSRLDKVEAEVQIDRLITGRLQSLQTYVTQQLIRAAEIRASANLAATKMSECVLGQSKRVDFCGKGYHLMSFPQSAPHGVVFLHVTYVPAQEKNFTTAPAICHDGKAHFPREGVFVSNGTHWFVTQRNFYEPQIITTDNTFVSGNCDVVIGIVNNTVYDPLQPELDSFKEELDKYFKNHTSPDVDLGDISGINASVVNIQKEIDRLNEVAKNLNESLIDLQELGKYEQYIKWPWYIWLGFIAGLIAIVMVTIMLCCMTSCCSCLKGCCSCGSCCKFDEDDSEPVLKGVKLHYT

SEQ ID NO: 7 - DNA, 1260 bp, synthetic construct
  source 1..1260: mol_type = other DNA
atgtctgataacggaccacagaatcagcgaaacgcaccacgcattacgtttggtggaccctcagattcaactggcagtaaccagaatggagaacgcagtggagcgcgatctaaacaacgtcggcctcaaggtttacccaataatactgcgtcttggttcaccgctctcactcaacatggcaaggaagaccttaaattccctcgaggacaaggcgttccaattaacaccaatagcagtccagatgaccaaattggctactaccgaagagctaccagacgaattcgtggtggtgacggtaagatgaaagatctcagtccaagatggtatttctactacctaggaactgggccagaagctggacttccctatggtgctaacaaagacggcatcatatgggttgcaactgagggagccttgaatacacctaaagatcacattggcacccgcaatcctgctaacaatgctgcaatcgtgctacaacttcctcaaggaacaacattgcctaaaggcttctacgcagaagggagcagaggcggcagtcaagcctcttctcgttcctcatcacgtagtcgcaacagttcaagaaattcaactccaggcagcagtagaggaacttctcctgctagaatggctggcaatggcggtgatgctgctcttgctttgctgctgcttgacagattgaaccagcttgagagcaagatgtctggtaaaggccaacaacaacaaggccaaactgtcactaagaaatctgctgctgaggcttctaagaagcctcggcagaaacgtactgccactaaagcatacaatgtaacacaagctttcggcagacgtggtccagaacaaacccaaggaaactttggagaccaggaactaatcagacaaggaactgattacaaacattggccgcaaattgcacaatttgctcccagcgcttcagcgttcttcggaatgtcgcgcattggcatggaagtcacaccttcgggaacgtggttgacctacacaggtgccatcaaattggatgacaaagatccaaatttcaaagatcaagtcatattgctgaataagcatattgacgcatacaagacattcccaccaacagagcctaagaaggacaagaagaagaaggctgatgaaactcaagccttaccgcagagacagaagaaacagcaaactgtgactcttcttcctgctgcagatttggatgatttctccaaacaattgcaacaatccatgagcagtgctgactcaactcaggcctaa

SEQ ID NO: 8 - protein, 419 aa, synthetic construct
MSDNGPQNQRNAPRITFGGPSDSTGSNQNGERSGARSKQRRPQGLPNNTASWFTALTQHGKEDLKFPRGQGVPINTNSSPDDQIGYYRRATRRIRGGDGKMKDLSPRWYFYYLGTGPEAGLPYGANKDGIIWVATEGALNTPKDHIGTRNPANNAAIVLQLPQGTTLPKGFYAEGSRGGSQASSRSSSRSRNSSRNSTPGSSRGTSPARMAGNGGDAALALLLLDRLNQLESKMSGKGQQQQGQTVTKKSAAEASKKPRQKRTATKAYNVTQAFGRRGPEQTQGNFGDQELIRQGTDYKHWPQIAQFAPSASAFFGMSRIGMEVTPSGTWLTYTGAIKLDDKDPNFKDQVILLNKHIDAYKTFPPTEPKKDKKKKADETQALPQRQKKQQTVTLLPAADLDDFSKQLQQSMSSADSTQA

SEQ ID NO: 9 - DNA, 3816 bp, synthetic construct
  source 1..3816: mol_type = other DNA
atgtttgtctttcttgtcttattgccactagtctctagtcagtgtgttaatcttagaaccagaactcaattaccacctgcatacactaattctttcacacgtggtgtttattaccctgacaaagtattcagatcctcagtattacattcaactcaggacttgttcttacctttcttctccaatgttacttggttccatgctatacatgtctctgggaccaatggtactaagaggtttgataaccctgtcctaccatttaatgatggtgtttatttcgcttccactgagaagtctaacataataagaggctggatatttggtactactttagattcgaagacccagtccctacttattgttaataacgctactaatgttgttattaaagtctgtgaatttcaattctgtaatgatccattcttggatgtttattaccacaagaacaacaagagttggatggaaagtggagtttattctagtgcgaataattgcactttcgaatatgtctctcagcctttccttatggaccttgaaggtaaacagggtaatttcaagaatcttagggaatttgtgtttaagaatattgatggttatttcaagatatattctaagcacacgcctattaatttagtgcgtgatctccctcagggtttctcggctttagaaccattggtagatttgccaataggtattaacatcactaggtttcaaactttacttgctttacatagaagttatttgactcctggtgattcttcttcaggttggacagctggtgctgcagcttattatgtgggttatcttcaacctaggactttcctattgaaatataatgagaatggaaccattacagatgctgtagactgtgcacttgaccctctctcagaaacaaagtgtacgttgaaatccttcactgtagagaaaggaatctatcaaacttctaactttagagtccaaccaacagaatctattgttagatttcctaatattacaaacttgtgccctttcggtgaagtatttaacgccaccagatttgcatctgtttatgcttggaacaggaagagaatcagcaactgtgttgctgattattctgtcctatataattccgcatcattctccacatttaagtgttatggagtgtctcctactaaattaaatgatctctgctttactaatgtctatgcagattcatttgtaattagaggtgatgaagtcagacaaatcgctccagggcaaactggaaagattgctgattataattataaattaccagatgactttacaggctgcgttatagcttggaattctaacaatcttgattctaaggttggtggtaattataattaccggtatagattgtttaggaagtctaatctcaaacctttcgagagagatatttcaactgaaatctatcaggccggtagcaaaccttgtaatggtgttgaaggatttaattgttactttcctttacaatcatatggtttccaacccactaatggtgttggttaccaaccatacagagtagtagtactttcatttgaacttctacatgcaccagcaactgtttgtggacctaagaagtctactaatttggttaagaacaaatgtgtcaatttcaacttcaatggtttaacaggcacaggtgttcttactgagtctaacaagaagtttctgcctttccaacaatttggcagagacattgctgacactactgatgctgtccgtgatccacagacacttgagattcttgacattacaccatgttcatttggtggtgtcagtgttataacaccaggaacaaatacttctaaccaggttgctgttctttatcagggtgttaactgcacagaagtccctgttgctattcatgcagatcaacttactcctacttggcgtgtttattctacaggttctaatgtatttcaaacacgtgcaggctgtttaataggagctgaacatgtcaacaactcatatgagtgtgacatacccattggtgcaggtatatgcgctagttatcagactcagactaattctcgtcggcgggcacgtagtgtagctagtcaatccatcattgcctacactatgtcacttggtgcagagaattcagttgcttactctaataactctattgccatacccacaaactttactattagtgttaccacagaaattctaccagtgtctatgaccaagacatcagtagattgtacaatgtacatttgtggtgattcaactgaatgcagcaatctattgttgcaatatggcagtttctgtacacaattaaaccgtgctttaactggaatagctgttgaacaagacaagaacacccaagaagtatttgcacaagtcaaacaaatttacaagacaccaccaattaaagatttcggtggatttaatttctcacaaatattaccagatccatctaaaccaagcaagaggtcatttattgaagatctactattcaacaaagtgacacttgcagatgctggcttcatcaaacaatatggtgattgccttggtgatattgctgctagagacctcatttgtgcacagaagtttaacggccttactgtattgccacctttgctcacagatgaaatgattgctcaatacacttctgcactgttagcgggtacaatcacttctggttggacctttggtgcaggtgctgcattacaaataccatttgctatgcaaatggcttataggtttaatggtattggagttacacagaatgttctctatgagaaccagaaattgattgccaaccaatttaatagtgctattggcaagattcaagactcactttcttccacagcaagtgcacttggtaaacttcagaatgtggtcaaccagaatgcacaagctttaaacacgcttgttaaacaacttagctccaactttggtgcaatttcaagtgtattaaatgatatcctttcacgtcttgacaaagttgaggctgaagtgcaaattgataggttgatcacaggcagacttcaaagtttgcagacatatgtgactcaacaattaattagagctgcagaaatcagagcttctgctaatcttgctgctactaagatgtcagagtgtgtacttggacaatctaagagagttgatttctgtggaaagggctatcatcttatgtccttccctcagtcagcacctcatggtgtagtcttcttgcatgtgacttatgtccctgcacaagagaagaacttcacaactgctcctgccatttgtcatgatggtaaagcacactttcctcgtgaaggtgtctttgtttcaaatggcacacactggtttgtaacacaaaggaatttctatgaaccacaaatcattactacagacaacacatttgtgtctggtaactgtgatgttgtaataggaattgtcaacaacacagtttatgatcctttgcaacctgaattagactcattcaaggaggagttagataaatatttcaagaatcatacatcaccagatgttgatttaggtgacatctctggcattaatgcttcagttgtaaacattcagaaagaaattgaccgcctcaatgaggttgccaagaatttaaatgaatctctcatcgatctccaagaacttggaaagtatgagcagtatatcaaatggccatggtacatttggctaggtttcatagctggcttgattgccatagtaatggtgacaattatgctttgctgtatgaccagttgctgtagttgtctcaagggctgttgttcttgtggatcctgctgcaaatttgatgaagacgactctgagccagtgctcaaaggagtcaaattacattacacataa

SEQ ID NO: 10 - protein, 1271 aa, synthetic construct
MFVFLVLLPLVSSQCVNLRTRTQLPPAYTNSFTRGVYYPDKVFRSSVLHSTQDLFLPFFSNVTWFHAIHVSGTNGTKRFDNPVLPFNDGVYFASTEKSNIIRGWIFGTTLDSKTQSLLIVNNATNVVIKVCEFQFCNDPFLDVYYHKNNKSWMESGVYSSANNCTFEYVSQPFLMDLEGKQGNFKNLREFVFKNIDGYFKIYSKHTPINLVRDLPQGFSALEPLVDLPIGINITRFQTLLALHRSYLTPGDSSSGWTAGAAAYYVGYLQPRTFLLKYNENGTITDAVDCALDPLSETKCTLKSFTVEKGIYQTSNFRVQPTESIVRFPNITNLCPFGEVFNATRFASVYAWNRKRISNCVADYSVLYNSASFSTFKCYGVSPTKLNDLCFTNVYADSFVIRGDEVRQIAPGQTGKIADYNYKLPDDFTGCVIAWNSNNLDSKVGGNYNYRYRLFRKSNLKPFERDISTEIYQAGSKPCNGVEGFNCYFPLQSYGFQPTNGVGYQPYRVVVLSFELLHAPATVCGPKKSTNLVKNKCVNFNFNGLTGTGVLTESNKKFLPFQQFGRDIADTTDAVRDPQTLEILDITPCSFGGVSVITPGTNTSNQVAVLYQGVNCTEVPVAIHADQLTPTWRVYSTGSNVFQTRAGCLIGAEHVNNSYECDIPIGAGICASYQTQTNSRRRARSVASQSIIAYTMSLGAENSVAYSNNSIAIPTNFTISVTTEILPVSMTKTSVDCTMYICGDSTECSNLLLQYGSFCTQLNRALTGIAVEQDKNTQEVFAQVKQIYKTPPIKDFGGFNFSQILPDPSKPSKRSFIEDLLFNKVTLADAGFIKQYGDCLGDIAARDLICAQKFNGLTVLPPLLTDEMIAQYTSALLAGTITSGWTFGAGAALQIPFAMQMAYRFNGIGVTQNVLYENQKLIANQFNSAIGKIQDSLSSTASALGKLQNVVNQNAQALNTLVKQLSSNFGAISSVLNDILSRLDKVEAEVQIDRLITGRLQSLQTYVTQQLIRAAEIRASANLAATKMSECVLGQSKRVDFCGKGYHLMSFPQSAPHGVVFLHVTYVPAQEKNFTTAPAICHDGKAHFPREGVFVSNGTHWFVTQRNFYEPQIITTDNTFVSGNCDVVIGIVNNTVYDPLQPELDSFKEELDKYFKNHTSPDVDLGDISGINASVVNIQKEIDRLNEVAKNLNESLIDLQELGKYEQYIKWPWYIWLGFIAGLIAIVMVTIMLCCMTSCCSCLKGCCSCGSCCKFDEDDSEPVLKGVKLHYT

SEQ ID NO: 11 - DNA, 3816 bp, synthetic construct
  source 1..3816: mol_type = other DNA
atgtttgtctttcttgtcttattgccactagtctctagtcagtgtgttaatcttagaaccagaactcaattaccacctgcatacactaattctttcacacgtggtgtttattaccctgacaaagtattcagatcctcagtattacattcaactcaggacttgttcttacctttcttctccaatgttacttggttccatgctatacatgtctctgggaccaatggtactaagaggtttgataaccctgtcctaccatttaatgatggtgtttatttcgcttccactgagaagtctaacataataagaggctggatatttggtactactttagattcgaagacccagtccctacttattgttaataacgctactaatgttgttattaaagtctgtgaatttcaattctgtaatgatccattcttgggtgtttattaccacaagaacaacaagagttggatggaaagtggtgtttattctagtgcgaataattgcactttcgaatatgtctctcagcctttccttatggaccttgaaggtaaacagggtaatttcaagaatcttagggaatttgtgtttaagaatattgatggttatttcaagatatattctaagcacacgcctattaatttagtgcgtgatctccctcagggtttctcggctttagaaccattggtagatttgccaataggtattaacatcactaggtttcaaactttacttgctttacatagaagttatttgactcctggtgattctttctcaggttggacagctggtgctgcagcttattatgtgggttatcttcaacctaggactttcctattgaaatataatgagaatggaaccattacagatgctgtagactgtgcacttgaccctctctcagaaacaaagtgtacgttgaaatccttcactgtagagaaaggaatctatcaaacttctaactttagagtccaaccaacagaatctattgttagatttcctaatattacaaacttgtgccctttcggtgaagtatttaacgccaccagatttgcatctgtttatgcttggaacaggaagagaatcagcaactgtgttgctgattattctgtcctatataattccgcatcattctccacatttaagtgttatggagtgtctcctactaaattaaatgatctctgctttactaatgtctatgcagattcatttgtaattagaggtgatgaagtcagacaaatcgctccagggcaaactggaaagattgctgattataattataaattaccagatgactttacaggctgcgttatagcttggaattctaacaatcttgattctaaggttggtggtaattataattaccggtatagattgtttaggaagtctaatctcaaacctttcgagagagatatttcaactgaaatctatcaggccggtagcaaaccttgtaatggtgttgaaggatttaattgttactttcctttacaatcatatggtttccaacccactaatggtgttggttaccaaccatacagagtagtagtactttcatttgaacttctacatgcaccagcaactgtttgtggacctaagaagtctactaatttggttaagaacaaatgtgtcaatttcaacttcaatggtttaacaggcacaggtgttcttactgagtctaacaagaagtttctgcctttccaacaatttggcagagacattgctgacactactgatgctgtccgtgatccacagacacttgagattcttgacattacaccatgttcatttggtggtgtcagtgttataacaccaggaacaaatacttctaaccaggttgctgttctttatcagggtgttaactgcacagaagtccctgttgctattcatgcagatcaacttactcctacttggcgtgtttattctacaggttctaatgtatttcaaacacgtgcaggctgtttaataggagctgaacatgtcaacaactcatatgagtgtgacatacccattggtgcaggtatatgcgctagttatcagactcagactaattctcgtcggcgggcacgtagtgtagctagtcaatccatcattgcctacactatgtcacttggtgcagagaattcagttgcttactctaataactctattgccatacccacaaactttactattagtgttaccacagaaattctaccagtgtctatgaccaagacatcagtagattgtacaatgtacatttgtggtgattcaactgaatgcagcaatctattgttgcaatatggcagtttctgtacacaattaaaccgtgctttaactggaatagctgttgaacaagacaagaacacccaagaagtatttgcacaagtcaaacaaatttacaagacaccaccaattaaagatttcggtggatttaatttctcacaaatattaccagatccatctaaaccaagcaagaggtcatttattgaagatctactattcaacaaagtgacacttgcagatgctggcttcatcaaacaatatggtgattgccttggtgatattgctgctagagacctcatttgtgcacagaagtttaacggccttactgtattgccacctttgctcacagatgaaatgattgctcaatacacttctgcactgttagcgggtacaatcacttctggttggacctttggtgcaggtgctgcattacaaataccatttgctatgcaaatggcttataggtttaatggtattggagttacacagaatgttctctatgagaaccagaaattgattgccaaccaatttaatagtgctattggcaagattcaagactcactttcttccacagcaagtgcacttggtaaacttcagaatgtggtcaaccagaatgcacaagctttaaacacgcttgttaaacaacttagctccaactttggtgcaatttcaagtgtattaaatgatatcctttcacgtcttgacaaagttgaggctgaagtgcaaattgataggttgatcacaggcagacttcaaagtttgcagacatatgtgactcaacaattaattagagctgcagaaatcagagcttctgctaatcttgctgctactaagatgtcagagtgtgtacttggacaatctaagagagttgatttctgtggaaagggctatcatcttatgtccttccctcagtcagcacctcatggtgtagtcttcttgcatgtgacttatgtccctgcacaagagaagaacttcacaactgctcctgccatttgtcatgatggtaaagcacactttcctcgtgaaggtgtctttgtttcaaatggcacacactggtttgtaacacaaaggaatttctatgaaccacaaatcattactacagacaacacatttgtgtctggtaactgtgatgttgtaataggaattgtcaacaacacagtttatgatcctttgcaacctgaattagactcattcaaggaggagttagataaatatttcaagaatcatacatcaccagatgttgatttaggtgacatctctggcattaatgcttcagttgtaaacattcagaaagaaattgaccgcctcaatgaggttgccaagaatttaaatgaatctctcatcgatctccaagaacttggaaagtatgagcagtatatcaaatggccatggtacatttggctaggtttcatagctggcttgattgccatagtaatggtgacaattatgctttgctgtatgaccagttgctgtagttgtctcaagggctgttgttcttgtggatcctgctgcaaatttgatgaagacgactctgagccagtgctcaaaggagtcaaattacattacacataa

SEQ ID NO: 12 - protein, 1271 aa, synthetic construct
MFVFLVLLPLVSSQCVNLRTRTQLPPAYTNSFTRGVYYPDKVFRSSVLHSTQDLFLPFFSNVTWFHAIHVSGTNGTKRFDNPVLPFNDGVYFASTEKSNIIRGWIFGTTLDSKTQSLLIVNNATNVVIKVCEFQFCNDPFLGVYYHKNNKSWMESGVYSSANNCTFEYVSQPFLMDLEGKQGNFKNLREFVFKNIDGYFKIYSKHTPINLVRDLPQGFSALEPLVDLPIGINITRFQTLLALHRSYLTPGDSFSGWTAGAAAYYVGYLQPRTFLLKYNENGTITDAVDCALDPLSETKCTLKSFTVEKGIYQTSNFRVQPTESIVRFPNITNLCPFGEVFNATRFASVYAWNRKRISNCVADYSVLYNSASFSTFKCYGVSPTKLNDLCFTNVYADSFVIRGDEVRQIAPGQTGKIADYNYKLPDDFTGCVIAWNSNNLDSKVGGNYNYRYRLFRKSNLKPFERDISTEIYQAGSKPCNGVEGFNCYFPLQSYGFQPTNGVGYQPYRVVVLSFELLHAPATVCGPKKSTNLVKNKCVNFNFNGLTGTGVLTESNKKFLPFQQFGRDIADTTDAVRDPQTLEILDITPCSFGGVSVITPGTNTSNQVAVLYQGVNCTEVPVAIHADQLTPTWRVYSTGSNVFQTRAGCLIGAEHVNNSYECDIPIGAGICASYQTQTNSRRRARSVASQSIIAYTMSLGAENSVAYSNNSIAIPTNFTISVTTEILPVSMTKTSVDCTMYICGDSTECSNLLLQYGSFCTQLNRALTGIAVEQDKNTQEVFAQVKQIYKTPPIKDFGGFNFSQILPDPSKPSKRSFIEDLLFNKVTLADAGFIKQYGDCLGDIAARDLICAQKFNGLTVLPPLLTDEMIAQYTSALLAGTITSGWTFGAGAALQIPFAMQMAYRFNGIGVTQNVLYENQKLIANQFNSAIGKIQDSLSSTASALGKLQNVVNQNAQALNTLVKQLSSNFGAISSVLNDILSRLDKVEAEVQIDRLITGRLQSLQTYVTQQLIRAAEIRASANLAATKMSECVLGQSKRVDFCGKGYHLMSFPQSAPHGVVFLHVTYVPAQEKNFTTAPAICHDGKAHFPREGVFVSNGTHWFVTQRNFYEPQIITTDNTFVSGNCDVVIGIVNNTVYDPLQPELDSFKEELDKYFKNHTSPDVDLGDISGINASVVNIQKEIDRLNEVAKNLNESLIDLQELGKYEQYIKWPWYIWLGFIAGLIAIVMVTIMLCCMTSCCSCLKGCCSCGSCCKFDEDDSEPVLKGVKLHYT

SEQ ID NO: 13 - DNA, 3822 bp, synthetic construct
  source 1..3822: mol_type = other DNA
atgtttgtctttcttgtcttattgccactagtctctagtcagtgtgttaatcttacaaccagaactcaattaccacctgcatacactaattctttcacacgtggtgtttattaccctgacaaagtattcagatcctcagtattacattcaactcaggacttgttcttacctttcttctccaatgttacttggttccatgctatacatgtctctgggaccaatggtactaagaggtttgataaccctgtcctaccatttaatgatggtgtttatttcgcttccattgagaagtctaacataataagaggctggatatttggtactactttagattcgaagacccagtccctacttattgttaataacgctactaatgttgttattaaagtctgtgaatttcaattctgtaatgatccattcttgggtgtttctaaccacaagaacaacaagagttggatggaaagtgagttcagagtttattctagtgcgaataattgcactttcgaatatgtctctcagcctttccttatggaccttgaaggtaaacagggtaatttcaagaatcttagggaatttgtgtttaagaatattgatggttatttcaagatatattctaagcacacgcctattaatttagtgcgtgatctccctcagggtttctcggctttagaaccattggtagatttgccaataggtattaacatcactaggtttcaaactttacttgctttacatagaagttatttgactcctggtgattcttcttcaggttggacagctggtgctgcagcttattatgtgggttatcttcaacctaggactttcctattgaaatataatgagaatggaaccattacagatgctgtagactgtgcacttgaccctctctcagaaacaaagtgtacgttgaaatccttcactgtagagaaaggaatctatcaaacttctaactttagagtccaaccaacagaatctattgttagatttcctaatattacaaacttgtgccctttcggtgaagtatttaacgccaccaaatttgcatctgtttatgcttggaacaggaagagaatcagcaactgtgttgctgattattctgtcctatataattccgcatcattctccacatttaagtgttatggagtgtctcctactaaattaaatgatctctgctttactaatgtctatgcagattcatttgtaattagaggtgatgaagtcagacaaatcgctccagggcaaactggaaagattgctgattataattataaattaccagatgactttacaggctgcgttatagcttggaattctaacaatcttgattctaaggttggtggtaattataattacctgtatagattgtttaggaagtctaatctcaaacctttcgagagagatatttcaactgaaatctatcaggccggtagcacaccttgtaatggtgttaaaggatttaattgttactttcctttacaatcatatggtttccaacccacttatggtgttggttaccaaccatacagagtagtagtactttcatttgaacttctacatgcaccagcaactgtttgtggacctaagaagtctactaatttggttaagaacaaatgtgtcaatttcaacttcaatggtttaacaggcacaggtgttcttactgagtctaacaagaagtttctgcctttccaacaatttggcagagacattgctgacactactgatgctgtccgtgatccacagacacttgagattcttgacattacaccatgttcatttggtggtgtcagtgttataacaccaggaacaaatacttctaaccaggttgctgttctttatcagggtgttaactgcacagaagtccctgttgctattcatgcagatcaacttactcctacttggcgtgtttattctacaggttctaatgtatttcaaacacgtgcaggctgtttaataggagctgaacatgtcaacaactcatatgagtgtgacatacccattggtgcaggtatatgcgctagttatcagactcagactaattctcatcggcgggcacgtagtgtagctagtcaatccatcattgcctacactatgtcacttggtgcagagaattcagttgcttactctaataactctattgccatacccacaaactttactattagtgttaccacagaaattctaccagtgtctatgaccaagacatcagtagattgtacaatgtacatttgtggtgattcaactgaatgcagcaatctattgttgcaatatggcagtttctgtacacaattaaaccgtgctttaactggaatagctgttgaacaagacaagaacacccaagaagtatttgcacaagtcaaacaaatttacaagacaccaccaattaaagatttcggtggatttaatttctcacaaatattaccagatccatctaaaccaagcaagaggtcatttattgaagatctactattcaacaaagtgacacttgcagatgctggcttcatcaaacaatatggtgattgccttggtgatattgctgctagagacctcatttgtgcacagaagtttaacggccttactgtattgccacctttgctcacagatgaaatgattgctcaatacacttctgcactgttagcgggtacaatcacttctggttggacctttggtgcaggtgctgcattacaaataccatttgctatgcaaatggcttataggtttaatggtattggagttacacagaatgttctctatgagaaccagaaattgattgccaaccaatttaatagtgctattggcaagattcaagactcactttcttccacagcaagtgcacttggtaaacttcagaatgtggtcaaccagaatgcacaagctttaaacacgcttgttaaacaacttagctccaactttggtgcaatttcaagtgtattaaatgatatcctttcacgtcttgacaaagttgaggctgaagtgcaaattgataggttgatcacaggcagacttcaaagtttgcagacatatgtgactcaacaattaattagagctgcagaaatcagagcttctgctaatcttgctgctactaagatgtcagagtgtgtacttggacaatctaagagagttgatttctgtggaaagggctatcatcttatgtccttccctcagtcagcacctcatggtgtagtcttcttgcatgtgacttatgtccctgcacaagagaagaacttcacaactgctcctgccatttgtcatgatggtaaagcacactttcctcgtgaaggtgtctttgtttcaaatggcacacactggtttgtaacacaaaggaatttctatgaaccacaaatcattactacagacaacacatttgtgtctggtaactgtgatgttgtaataggaattgtcaacaacacagtttatgatcctttgcaacctgaattagactcattcaaggaggagttagataaatatttcaagaatcatacatcaccagatgttgatttaggtgacatctctggcattaatgcttcagttgtaaacattcagaaagaaattgaccgcctcaatgaggttgccaagaatttaaatgaatctctcatcgatctccaagaacttggaaagtatgagcagtatatcaaatggccatggtacatttggctaggtttcatagctggcttgattgccatagtaatggtgacaattatgctttgctgtatgaccagttgctgtagttgtctcaagggctgttgttcttgtggatcctgctgcaaatttgatgaagacgactctgagccagtgctcaaaggagtcaaattacattacacataa

SEQ ID NO: 14 - protein, 1273 aa, synthetic construct
MFVFLVLLPLVSSQCVNLTTRTQLPPAYTNSFTRGVYYPDKVFRSSVLHSTQDLFLPFFSNVTWFHAIHVSGTNGTKRFDNPVLPFNDGVYFASIEKSNIIRGWIFGTTLDSKTQSLLIVNNATNVVIKVCEFQFCNDPFLGVSNHKNNKSWMESEFRVYSSANNCTFEYVSQPFLMDLEGKQGNFKNLREFVFKNIDGYFKIYSKHTPINLVRDLPQGFSALEPLVDLPIGINITRFQTLLALHRSYLTPGDSSSGWTAGAAAYYVGYLQPRTFLLKYNENGTITDAVDCALDPLSETKCTLKSFTVEKGIYQTSNFRVQPTESIVRFPNITNLCPFGEVFNATKFASVYAWNRKRISNCVADYSVLYNSASFSTFKCYGVSPTKLNDLCFTNVYADSFVIRGDEVRQIAPGQTGKIADYNYKLPDDFTGCVIAWNSNNLDSKVGGNYNYLYRLFRKSNLKPFERDISTEIYQAGSTPCNGVKGFNCYFPLQSYGFQPTYGVGYQPYRVVVLSFELLHAPATVCGPKKSTNLVKNKCVNFNFNGLTGTGVLTESNKKFLPFQQFGRDIADTTDAVRDPQTLEILDITPCSFGGVSVITPGTNTSNQVAVLYQGVNCTEVPVAIHADQLTPTWRVYSTGSNVFQTRAGCLIGAEHVNNSYECDIPIGAGICASYQTQTNSHRRARSVASQSIIAYTMSLGAENSVAYSNNSIAIPTNFTISVTTEILPVSMTKTSVDCTMYICGDSTECSNLLLQYGSFCTQLNRALTGIAVEQDKNTQEVFAQVKQIYKTPPIKDFGGFNFSQILPDPSKPSKRSFIEDLLFNKVTLADAGFIKQYGDCLGDIAARDLICAQKFNGLTVLPPLLTDEMIAQYTSALLAGTITSGWTFGAGAALQIPFAMQMAYRFNGIGVTQNVLYENQKLIANQFNSAIGKIQDSLSSTASALGKLQNVVNQNAQALNTLVKQLSSNFGAISSVLNDILSRLDKVEAEVQIDRLITGRLQSLQTYVTQQLIRAAEIRASANLAATKMSECVLGQSKRVDFCGKGYHLMSFPQSAPHGVVFLHVTYVPAQEKNFTTAPAICHDGKAHFPREGVFVSNGTHWFVTQRNFYEPQIITTDNTFVSGNCDVVIGIVNNTVYDPLQPELDSFKEELDKYFKNHTSPDVDLGDISGINASVVNIQKEIDRLNEVAKNLNESLIDLQELGKYEQYIKWPWYIWLGFIAGLIAIVMVTIMLCCMTSCCSCLKGCCSCGSCCKFDEDDSEPVLKGVKLHYT

SEQ ID NO: 15 - DNA, 3813 bp, synthetic construct
  source 1..3813: mol_type = other DNA
atgtttgtctttcttgtcttattgctactagtctctagtcagtgtgttaatcttacaaccagaactcaattaccacctgcatacactaattctttcacacgtggtgtttattaccctgacaaagtattcagatcctcagtattacattcaactcaggacttgttcttacctttcttctccaatgttacttggttccatgctatacatgtctctgggaccaatggtactaagaggtttgataaccctgtcctaccatttaatgatggtgtttatttcgcttccactgagaagtctaacataataagaggctggatatttggtactactttagattcgaagacccagtccctacttattgttaataacgctactaatgttgttattaaagtctgtgaatttcaattctttaatgatccattcttgggtgtttaccacaagaacaacaagagttggatggaaagtgagttcagagtttattctagtgcgaataattgcactttcgaatatgtctctcagcctttccttatggaccttgaaggtaaacagggtaatttcaagaatcttagcgaatttgtgtttaagaatattgatggttatttcaagatatattctaagcacacgcctattaatttagtgcgtggtctccctcagggtttctcggctttagaaccattggtagatttgccaataggtattaacatcactaggtttcaaactttattacatagaagttatttgactcctggtgattcttcttcaggttggacagctggtgctgcagcttattatgtgggttatcttcaacctaggactttcctattgaaatataatgagaatggaaccattacagatgctgtagactgtgcacttgaccctctctcagaaacaaagtgtacgttgaaatccttcactgtagagaaaggaatctatcaaacttctaactttagagtccaaccaacagaatctattgttagatttcctaatattacaaacttgtgccctttcggtgaagtatttaacgccaccagatttgcatctgtttatgcttggaacaggaagagaatcagcaactgtgttgctgattattctgtcctatataattccgcatcattctccacatttaagtgttatggagtgtctcctactaaattaaatgatctctgctttactaatgtctatgcagattcatttgtaattagaggtgatgaagtcagacaaatcgctccagggcaaactggaaagattgctgattataattataaattaccagatgactttacaggctgcgttatagcttggaattctaacaatcttgattctaaggttggtggtaatcataattacctgtatagattgtttaggaagtctaatctcaaacctttcgagagagatatttcaactgaaatctatcaggccggtagcacaccttgtaatggtgttaaaggatttaattgttactttcctttacaatcatatggtttccaacccacttatggtgttggttaccaaccatacagagtagtagtactttcatttgaacttctacatgcaccagcaactgtttgtggacctaagaagtctactaatttggttaagaacaaatgtgtcaatttcaacttcaatggtttaacaggcacaggtgttcttactgagtctaacaagaagtttctgcctttccaacaatttggcagagacattgctgacactactgatgctgtccgtgatccacagacacttgagattcttgacattacaccatgttcatttggtggtgtcagtgttataacaccaggaacaaatacttctaaccaggttgctgttctttatcagggtgttaactgcacagaagtccctgttgctattcatgcagatcaacttactcctacttggcgtgtttattctacaggttctaatgtatttcaaacacgtgcaggctgtttaataggagctgaatatgtcaacaactcatatgagtgtgacatacccattggtgcaggtatatgcgctagttatcagactcagactaagtctcctcggcgggcacgtagtgtagctagtcaatccatcattgcctacactatgtcacttggtgcagagaattcagttgcttactctaataactctattgccatacccataaactttactattagtgttaccacagaaattctaccagtgtctatgaccaagacatcagtagattgtacaatgtacatttgtggtgattcaactgaatgcagcaatctattgttgcaatatggcagtttctgtacacaattaaaccgtgctttaactggaatagctgttgaacaagacaagaacacccaagaagtatttgcacaagtcaaacaaatttacaagacaccaccaattaaagatttcggtggatttaatttctcacaaatattaccagatccatctaaaccaagcaagaggtcatttattgaagatctactattcaacaaagtgacacttgcagatgctggcttcatcaaacaatatggtgattgccttggtgatattgctgctagagacctcatttgtgcacagaagtttaacggccttaatgtattgccacctttgctcacagatgaaatgattgctcaatacacttctgcactgttagcgggtacaatcacttctggttggacctttggtgcaggtgctgcattacaaataccatttgctatgcaaatggcttataggtttaatggtattggagttacacagaatgttctctatgagaaccagaaattgattgccaaccaatttaatagtgctattggcaagattcaagactcactttcttccacagcaagtgcacttggtaaacttcaagatgtggtcaaccagaatgcacaagctttaaacacgcttgttaaacaacttagctccaactttggtgcaatttcaagtgtattaaatgatatcctttcacgtcttgacaaagttgaggctgaagtgcaaattgataggttgatcacaggcagacttcaaagtttgcagacatatgtgactcaacaattaattagagctgcagaaatcagagcttctgctaatcttgctgctactaagatgtcagagtgtgtacttggacaatctaagagagttgatttctgtggaaagggctatcatcttatgtccttccctcagtcagcacctcatggtgtagtcttcttgcatgtgacttatgtccctgcacaagagaagaacttcacaactgctcctgccatttgtcatgatggtaaagcacactttcctcgtgaaggtgtctttgtttcaaatggcacacactggtttgtaacacaaaggaatttctatgaaccacaaatcattactacagacaacacatttgtgtctggtaactgtgatgttgtaataggaattgtcaacaacacagtttatgatcctttgcaacctgaattagactcattcaaggaggagttagataaatatttcaagaatcatacatcaccagatgttgatttaggtgacatctctggcattaatgcttcagttgtaaacattcagaaagaaattgaccgcctcaatgaggttgccaagaatttaaatgaatctctcatcgatctccaagaacttggaaagtatgagcagtatatcaaatggccatggtacatttggctaggtttcatagctggcttgattgccatagtaatggtgacaattatgctttgctgtatgaccagttgctgtagttgtctcaagggctgttgttcttgtggatcctgctgcaaatttgatgaagacgactctgagccagtgctcaaaggagtcaaattacattacacataa

SEQ ID NO: 16 - protein, 1270 aa, synthetic construct
MFVFLVLLLLVSSQCVNLTTRTQLPPAYTNSFTRGVYYPDKVFRSSVLHSTQDLFLPFFSNVTWFHAIHVSGTNGTKRFDNPVLPFNDGVYFASTEKSNIIRGWIFGTTLDSKTQSLLIVNNATNVVIKVCEFQFFNDPFLGVYHKNNKSWMESEFRVYSSANNCTFEYVSQPFLMDLEGKQGNFKNLSEFVFKNIDGYFKIYSKHTPINLVRGLPQGFSALEPLVDLPIGINITRFQTLLHRSYLTPGDSSSGWTAGAAAYYVGYLQPRTFLLKYNENGTITDAVDCALDPLSETKCTLKSFTVEKGIYQTSNFRVQPTESIVRFPNITNLCPFGEVFNATRFASVYAWNRKRISNCVADYSVLYNSASFSTFKCYGVSPTKLNDLCFTNVYADSFVIRGDEVRQIAPGQTGKIADYNYKLPDDFTGCVIAWNSNNLDSKVGGNHNYLYRLFRKSNLKPFERDISTEIYQAGSTPCNGVKGFNCYFPLQSYGFQPTYGVGYQPYRVVVLSFELLHAPATVCGPKKSTNLVKNKCVNFNFNGLTGTGVLTESNKKFLPFQQFGRDIADTTDAVRDPQTLEILDITPCSFGGVSVITPGTNTSNQVAVLYQGVNCTEVPVAIHADQLTPTWRVYSTGSNVFQTRAGCLIGAEYVNNSYECDIPIGAGICASYQTQTKSPRRARSVASQSIIAYTMSLGAENSVAYSNNSIAIPINFTISVTTEILPVSMTKTSVDCTMYICGDSTECSNLLLQYGSFCTQLNRALTGIAVEQDKNTQEVFAQVKQIYKTPPIKDFGGFNFSQILPDPSKPSKRSFIEDLLFNKVTLADAGFIKQYGDCLGDIAARDLICAQKFNGLNVLPPLLTDEMIAQYTSALLAGTITSGWTFGAGAALQIPFAMQMAYRFNGIGVTQNVLYENQKLIANQFNSAIGKIQDSLSSTASALGKLQDVVNQNAQALNTLVKQLSSNFGAISSVLNDILSRLDKVEAEVQIDRLITGRLQSLQTYVTQQLIRAAEIRASANLAATKMSECVLGQSKRVDFCGKGYHLMSFPQSAPHGVVFLHVTYVPAQEKNFTTAPAICHDGKAHFPREGVFVSNGTHWFVTQRNFYEPQIITTDNTFVSGNCDVVIGIVNNTVYDPLQPELDSFKEELDKYFKNHTSPDVDLGDISGINASVVNIQKEIDRLNEVAKNLNESLIDLQELGKYEQYIKWPWYIWLGFIAGLIAIVMVTIMLCCMTSCCSCLKGCCSCGSCCKFDEDDSEPVLKGVKLHYT

SEQ ID NO: 17 - DNA, 1260 bp, synthetic construct
  source 1..1260: mol_type = other DNA
atgtctgataacggaccacagaatcagcgaaacgcaccacgcattacgtttggtggaccctcagattcaactggcagtaaccagaatggagaacgcagtggagcgcgatctaaacaacgtcggcctcaaggtttacccaataatactgcgtcttggttcaccgctctcactcaacatggcaaggaaggccttaaattccctcgaggacaaggcgttccaattaacaccaatagcagtccagatgaccaaattggctactaccgaagagctaccagacgaattcgtggtggtgacggtaagatgaaagatctcagtccaagatggtatttctactacctaggaactgggccagaagctggacttccctatggtgctaacaaagacggcatcatatgggttgcaactgagggagccttgaatacacctaaagatcacattggcacccgcaatcctgctaacaatgctgcaatcgtgctacaacttcctcaaggaacaacattgcctaaaggcttctacgcagaagggagcagaggcggcagtcaagcctcttctcgttcctcatcacgtagtcgcaacagttcaagaaattcaactccaggcagcagtatgggaacttctcctgctagaatggctggcaatggctgtgatgctgctcttgctttgctgctgcttgacagattgaaccagcttgagagcaagatgtctggtaaaggccaacaacaacaaggccaaactgtcactaagaaatctgctgctgaggcttctaagaagcctcggcagaaacgtactgccactaaagcatacaatgtaacacaagctttcggcagacgtggtccagaacaaacccaaggaaactttggagaccaggaactaatcagacaaggaactgattacaaacattggccgcaaattgcacaatttgctcccagcgcttcagcgttcttcggaatgtcgcgcattggcatggaagtcacaccttcgggaacgtggttgacctacacaggtgccatcaaattggatgacaaagatccaaatttcaaagatcaagtcatattgctgaataagcatattgacgcatacaagacattcccaccaacagagcctaagaaggacaagaagaagaaggcttatgaaactcaagccttaccgcagagacagaagaaacagcaaactgtgactcttcttcctgctgcagatttggatgatttctccaaacaattgcaacaatccatgagcagtgctgactcaactcaggcctaa

SEQ ID NO: 18 - protein, 419 aa, synthetic construct
MSDNGPQNQRNAPRITFGGPSDSTGSNQNGERSGARSKQRRPQGLPNNTASWFTALTQHGKEGLKFPRGQGVPINTNSSPDDQIGYYRRATRRIRGGDGKMKDLSPRWYFYYLGTGPEAGLPYGANKDGIIWVATEGALNTPKDHIGTRNPANNAAIVLQLPQGTTLPKGFYAEGSRGGSQASSRSSSRSRNSSRNSTPGSSMGTSPARMAGNGCDAALALLLLDRLNQLESKMSGKGQQQQGQTVTKKSAAEASKKPRQKRTATKAYNVTQAFGRRGPEQTQGNFGDQELIRQGTDYKHWPQIAQFAPSASAFFGMSRIGMEVTPSGTWLTYTGAIKLDDKDPNFKDQVILLNKHIDAYKTFPPTEPKKDKKKKAYETQALPQRQKKQQTVTLLPAADLDDFSKQLQQSMSSADSTQA

SEQ ID NO: 19 - DNA, 1260 bp, synthetic construct
  source 1..1260: mol_type = other DNA
atgtctgataacggaccacagaatcagcgaaacgcactacgcattacgtttggtggaccctcagattcaactggcagtaaccagaatggagaacgcagtggagcgcgatctaaacaacgtcggcctcaaggtttacccaataatactgcgtcttggttcaccgctctcactcaacatggcaaggaagaccttaaattccctcgaggacaaggcgttccaattaacaccaatagcagtccagatgaccaaattggctactaccgaagagctaccagacgaattcgtggtggtgacggtaagatgaaagatctcagtccaagatggtatttctactacctaggaactgggccagaagctggacttccctatggtgctaacaaagacggcatcatatgggttgcaactgagggagccttgaatacacctaaagatcacattggcacccgcaatcctgctaacaatgctgcaatcgtgctacaacttcctcaaggaacaacattgcctaaaggcttctacgcagaagggagcagaggcggcagtcaagcctcttctcgttcctcatcacgtagtcgcaacagttcaagaaattcaactccaggcagcagtaaacgaacttctcctgctagaatggctggcaatggcggtgatgctgctcttgctttgctgctgcttgacagattgaaccagcttgagagcaagatgtctggtaaaggccaacaacaacaaggccaaactgtcactaagaaatctgctgctgaggcttctaagaagcctcggcagaaacgtactgccactaaagcatacaatgtaacacaagctttcggcagacgtggtccagaacaaacccaaggaaactttggagaccaggaactaatcagacaaggaactgattacaaacattggccgcaaattgcacaatttgctcccagcgcttcagcgttcttcggaatgtcgcgcattggcatggaagtcacaccttcgggaacgtggttgacctacacaggtgccatcaaattggatgacaaagatccaaatttcaaagatcaagtcatattgctgaataagcatattgacgcatacaagacattcccaccaacagagcctaagaaggacaagaagaagaaggctgatgaaactcaagccttaccgcacagacagaagaaacagcaaactgtgactcttcttcctgctgcagatttggatgatttctccaaacaattgcaacaatccatgagcagtgctgactcaactcaggcctaa

SEQ ID NO: 20 - protein, 419 aa, synthetic construct
MSDNGPQNQRNALRITFGGPSDSTGSNQNGERSGARSKQRRPQGLPNNTASWFTALTQHGKEDLKFPRGQGVPINTNSSPDDQIGYYRRATRRIRGGDGKMKDLSPRWYFYYLGTGPEAGLPYGANKDGIIWVATEGALNTPKDHIGTRNPANNAAIVLQLPQGTTLPKGFYAEGSRGGSQASSRSSSRSRNSSRNSTPGSSKRTSPARMAGNGGDAALALLLLDRLNQLESKMSGKGQQQQGQTVTKKSAAEASKKPRQKRTATKAYNVTQAFGRRGPEQTQGNFGDQELIRQGTDYKHWPQIAQFAPSASAFFGMSRIGMEVTPSGTWLTYTGAIKLDDKDPNFKDQVILLNKHIDAYKTFPPTEPKKDKKKKADETQALPHRQKKQQTVTLLPAADLDDFSKQLQQSMSSADSTQA

SEQ ID NO: 21 - DNA, 3813 bp, synthetic construct
  source 1..3813: mol_type = other DNA
atgtttgtctttcttgtcttattgccactagtctctagtcagtgtgttaactttacaaccagaactcaattaccacctgcatacactaattctttcacacgtggtgtttattaccctgacaaagtattcagatcctcagtattacattcaactcaggacttgttcttacctttcttctccaatgttacttggttccatgctatacatgtctctgggaccaatggtactaagaggtttgctaaccctgtcctaccatttaatgatggtgtttatttcgcttccactgagaagtctaacataataagaggctggatatttggtactactttagattcgaagacccagtccctacttattgttaataacgctactaatgttgttattaaagtctgtgaatttcaattctgtaatgatccattcttgggtgtttattaccacaagaacaacaagagttggatggaaagtgagttcagagtttattctagtgcgaataattgcactttcgaatatgtctctcagcctttccttatggaccttgaaggtaaacagggtaatttcaagaatcttagggaatttgtgtttaagaatattgatggttatttcaagatatattctaagcacacgcctattaatttagtgcgtggtctccctcagggtttctcggctttagaaccattggtagatttgccaataggtattaacatcactaggtttcaaactttacatataagttatttgactcctggtgattcttcttcaggttggacagctggtgctgcagcttattatgtgggttatcttcaacctaggactttcctattgaaatataatgagaatggaaccattacagatgctgtagactgtgcacttgaccctctctcagaaacaaagtgtacgttgaaatccttcactgtagagaaaggaatctatcaaacttctaactttagagtccaaccaacagaatctattgttagatttcctaatattacaaacttgtgccctttcggtgaagtatttaacgccaccagatttgcatctgtttatgcttggaacaggaagagaatcagcaactgtgttgctgattattctgtcctatataattccgcatcattctccacatttaagtgttatggagtgtctcctactaaattaaatgatctctgctttactaatgtctatgcagattcatttgtaattagaggtgatgaagtcagacaaatcgctccagggcaaactggaaatattgctgattataattataaattaccagatgactttacaggctgcgttatagcttggaattctaacaatcttgattctaaggttggtggtaattataattacctgtatagattgtttaggaagtctaatctcaaacctttcgagagagatatttcaactgaaatctatcaggccggtagcacaccttgtaatggtgttaaaggatttaattgttactttcctttacaatcatatggtttccaacccacttatggtgttggttaccaaccatacagagtagtagtactttcatttgaacttctacatgcaccagcaactgtttgtggacctaagaagtctactaatttggttaagaacaaatgtgtcaatttcaacttcaatggtttaacaggcacaggtgttcttactgagtctaacaagaagtttctgcctttccaacaatttggcagagacattgctgacactactgatgctgtccgtgatccacagacacttgagattcttgacattacaccatgttcatttggtggtgtcagtgttataacaccaggaacaaatacttctaaccaggttgctgttctttatcagggtgttaactgcacagaagtccctgttgctattcatgcagatcaacttactcctacttggcgtgtttattctacaggttctaatgtatttcaaacacgtgcaggctgtttaataggagctgaacatgtcaacaactcatatgagtgtgacatacccattggtgcaggtatatgcgctagttatcagactcagactaattctcctcggcgggcacgtagtgtagctagtcaatccatcattgcctacactatgtcacttggtgtagagaattcagttgcttactctaataactctattgccatacccacaaactttactattagtgttaccacagaaattctaccagtgtctatgaccaagacatcagtagattgtacaatgtacatttgtggtgattcaactgaatgcagcaatctattgttgcaatatggcagtttctgtacacaattaaaccgtgctttaactggaatagctgttgaacaagacaagaacacccaagaagtatttgcacaagtcaaacaaatttacaagacaccaccaattaaagatttcggtggatttaatttctcacaaatattaccagatccatctaaaccaagcaagaggtcatttattgaagatctactattcaacaaagtgacacttgcagatgctggcttcatcaaacaatatggtgattgccttggtgatattgctgctagagacctcatttgtgcacagaagtttaacggccttactgtattgccacctttgctcacagatgaaatgattgctcaatacacttctgcactgttagcgggtacaatcacttctggttggacctttggtgcaggtgctgcattacaaataccatttgctatgcaaatggcttataggtttaatggtattggagttacacagaatgttctctatgagaaccagaaattgattgccaaccaatttaatagtgctattggcaagattcaagactcactttcttccacagcaagtgcacttggtaaacttcaagatgtggtcaaccagaatgcacaagctttaaacacgcttgttaaacaacttagctccaactttggtgcaatttcaagtgtattaaatgatatcctttcacgtcttgacaaagttgaggctgaagtgcaaattgataggttgatcacaggcagacttcaaagtttgcagacatatgtgactcaacaattaattagagctgcagaaatcagagcttctgctaatcttgctgctactaagatgtcagagtgtgtacttggacaatctaagagagttgatttctgtggaaagggctatcatcttatgtccttccctcagtcagcacctcatggtgtagtcttcttgcatgtgacttatgtccctgcacaagagaagaacttcacaactgctcctgccatttgtcatgatggtaaagcacactttcctcgtgaaggtgtctttgtttcaaatggcacacactggtttgtaacacaaaggaatttctatgaaccacaaatcattactacagacaacacatttgtgtctggtaactgtgatgttgtaataggaattgtcaacaacacagtttatgatcctttgcaacctgaattagactcattcaaggaggagttagataaatatttcaagaatcatacatcaccagatgttgatttaggtgacatctctggcattaatgcttcagttgtaaacattcagaaagaaattgaccgcctcaatgaggttgccaagaatttaaatgaatctctcatcgatctccaagaacttggaaagtatgagcagtatatcaaatggccatggtacatttggctaggtttcatagctggcttgattgccatagtaatggtgacaattatgctttgctgtatgaccagttgctgtagttgtctcaagggctgttgttcttgtggatcctgctgcaaatttgatgaagacgactctgagccagtgctcaaaggagtcaaattacattacacataa

SEQ ID NO: 22 - protein, 1270 aa, synthetic construct
MFVFLVLLPLVSSQCVNFTTRTQLPPAYTNSFTRGVYYPDKVFRSSVLHSTQDLFLPFFSNVTWFHAIHVSGTNGTKRFANPVLPFNDGVYFASTEKSNIIRGWIFGTTLDSKTQSLLIVNNATNVVIKVCEFQFCNDPFLGVYYHKNNKSWMESEFRVYSSANNCTFEYVSQPFLMDLEGKQGNFKNLREFVFKNIDGYFKIYSKHTPINLVRGLPQGFSALEPLVDLPIGINITRFQTLHISYLTPGDSSSGWTAGAAAYYVGYLQPRTFLLKYNENGTITDAVDCALDPLSETKCTLKSFTVEKGIYQTSNFRVQPTESIVRFPNITNLCPFGEVFNATRFASVYAWNRKRISNCVADYSVLYNSASFSTFKCYGVSPTKLNDLCFTNVYADSFVIRGDEVRQIAPGQTGNIADYNYKLPDDFTGCVIAWNSNNLDSKVGGNYNYLYRLFRKSNLKPFERDISTEIYQAGSTPCNGVKGFNCYFPLQSYGFQPTYGVGYQPYRVVVLSFELLHAPATVCGPKKSTNLVKNKCVNFNFNGLTGTGVLTESNKKFLPFQQFGRDIADTTDAVRDPQTLEILDITPCSFGGVSVITPGTNTSNQVAVLYQGVNCTEVPVAIHADQLTPTWRVYSTGSNVFQTRAGCLIGAEHVNNSYECDIPIGAGICASYQTQTNSPRRARSVASQSIIAYTMSLGVENSVAYSNNSIAIPTNFTISVTTEILPVSMTKTSVDCTMYICGDSTECSNLLLQYGSFCTQLNRALTGIAVEQDKNTQEVFAQVKQIYKTPPIKDFGGFNFSQILPDPSKPSKRSFIEDLLFNKVTLADAGFIKQYGDCLGDIAARDLICAQKFNGLTVLPPLLTDEMIAQYTSALLAGTITSGWTFGAGAALQIPFAMQMAYRFNGIGVTQNVLYENQKLIANQFNSAIGKIQDSLSSTASALGKLQDVVNQNAQALNTLVKQLSSNFGAISSVLNDILSRLDKVEAEVQIDRLITGRLQSLQTYVTQQLIRAAEIRASANLAATKMSECVLGQSKRVDFCGKGYHLMSFPQSAPHGVVFLHVTYVPAQEKNFTTAPAICHDGKAHFPREGVFVSNGTHWFVTQRNFYEPQIITTDNTFVSGNCDVVIGIVNNTVYDPLQPELDSFKEELDKYFKNHTSPDVDLGDISGINASVVNIQKEIDRLNEVAKNLNESLIDLQELGKYEQYIKWPWYIWLGFIAGLIAIVMVTIMLCCMTSCCSCLKGCCSCGSCCKFDEDDSEPVLKGVKLHYT

SEQ ID NO: 23 - DNA, 1260 bp, synthetic construct
  source 1..1260: mol_type = other DNA
atgtctgataacggaccacagaatcagcgaaacgcaccacgcattacgtttggtggaccctcagattcaactggcagtaaccagaatggagaacgcagtggagcgcgatctaaacaacgtcggcctcaaggtttacccaataatactgcgtcttggttcaccgctctcactcaacatggcaaggaagaccttaaattccctcgaggacaaggcgttccaattaacaccaatagcagtccagatgaccaaattggctactaccgaagagctaccagacgaattcgtggtggtgacggtaagatgaaagatctcagtccaagatggtatttctactacctaggaactgggccagaagctggacttccctatggtgctaacaaagacggcatcatatgggttgcaactgagggagccttgaatacacctaaagatcacattggcacccgcaatcctgctaacaatgctgcaatcgtgctacaacttcctcaaggaacaacattgcctaaaggcttctacgcagaagggagcagaggcggcagtcaagcctcttctcgttcctcatcacgtagtcgcaacagttcaagaaattcaactccaggcagcagtagaggaatctctcctgctagaatggctggcaatggcggtgatgctgctcttgctttgctgctgcttgacagattgaaccagcttgagagcaagatgtctggtaaaggccaacaacaacaaggccaaactgtcactaagaaatctgctgctgaggcttctaagaagcctcggcagaaacgtactgccactaaagcatacaatgtaacacaagctttcggcagacgtggtccagaacaaacccaaggaaactttggagaccaggaactaatcagacaaggaactgattacaaacattggccgcaaattgcacaatttgctcccagcgcttcagcgttcttcggaatgtcgcgcattggcatggaagtcacaccttcgggaacgtggttgacctacacaggtgccatcaaattggatgacaaagatccaaatttcaaagatcaagtcatattgctgaataagcatattgacgcatacaagacattcccaccaacagagcctaagaaggacaagaagaagaaggctgatgaaactcaagccttaccgcagagacagaagaaacagcaaactgtgactcttcttcctgctgcagatttggatgatttctccaaacaattgcaacaatccatgagcagtgctgactcaactcaggcctaa

SEQ ID NO: 24 - protein, 419 aa, synthetic construct
MSDNGPQNQRNAPRITFGGPSDSTGSNQNGERSGARSKQRRPQGLPNNTASWFTALTQHGKEDLKFPRGQGVPINTNSSPDDQIGYYRRATRRIRGGDGKMKDLSPRWYFYYLGTGPEAGLPYGANKDGIIWVATEGALNTPKDHIGTRNPANNAAIVLQLPQGTTLPKGFYAEGSRGGSQASSRSSSRSRNSSRNSTPGSSRGISPARMAGNGGDAALALLLLDRLNQLESKMSGKGQQQQGQTVTKKSAAEASKKPRQKRTATKAYNVTQAFGRRGPEQTQGNFGDQELIRQGTDYKHWPQIAQFAPSASAFFGMSRIGMEVTPSGTWLTYTGAIKLDDKDPNFKDQVILLNKHIDAYKTFPPTEPKKDKKKKADETQALPQRQKKQQTVTLLPAADLDDFSKQLQQSMSSADSTQA

SEQ ID NO: 25 - DNA, 3813 bp, synthetic construct
  source 1..3813: mol_type = other DNA
atgtttgtctttcttgtcttattgccactagtctctagtcagtgtgttaatcttacaaccagaactcaattaccacctgcatacactaattctttcacacgtggtgtttattaccctgacaaagtattcagatcctcagtattacattcaactcaggacttgttcttacctttcttctccaatgttacttggttccatgttatatctgggaccaatggtactaagaggtttgataaccctgtcctaccatttaatgatggtgtttatttcgcttccattgagaagtctaacataataagaggctggatatttggtactactttagattcgaagacccagtccctacttattgttaataacgctactaatgttgttattaaagtctgtgaatttcaattctgtaatgatccattcttggatcacaagaacaacaagagttggatggaaagtgagttcagagtttattctagtgcgaataattgcactttcgaatatgtctctcagcctttccttatggaccttgaaggtaaacagggtaatttcaagaatcttagggaatttgtgtttaagaatattgatggttatttcaagatatattctaagcacacgcctattatagtgcgtgaacctgaagatctccctcagggtttctcggctttagaaccattggtagatttgccaataggtattaacatcactaggtttcaaactttacttgctttacatagaagttatttgactcctggtgattcttcttcaggttggacagctggtgctgcagcttattatgtgggttatcttcaacctaggactttcctattgaaatataatgagaatggaaccattacagatgctgtagactgtgcacttgaccctctctcagaaacaaagtgtacgttgaaatccttcactgtagagaaaggaatctatcaaacttctaactttagagtccaaccaacagaatctattgttagatttcctaatattacaaacttgtgccctttcgacgaagtatttaacgccaccagatttgcatctgtttatgcttggaacaggaagagaatcagcaactgtgttgctgattattctgtcctatataatctcgcaccattcttcacatttaagtgttatggagtgtctcctactaaattaaatgatctctgctttactaatgtctatgcagattcatttgtaattagaggtgatgaagtcagacaaatcgctccagggcaaactggaaatattgctgattataattataaattaccagatgactttacaggctgcgttatagcttggaattctaacaaacttgattctaaggttagtggtaattataattacctgtatagattgtttaggaagtctaatctcaaacctttcgagagagatatttcaactgaaatctatcaggccggtaacaaaccttgtaatggtgttgcaggatttaattgttactttcctttacgatcatatagtttccgacccacttatggtgttggtcaccaaccatacagagtagtagtactttcatttgaacttctacatgcaccagcaactgtttgtggacctaagaagtctactaatttggttaagaacaaatgtgtcaatttcaacttcaatggtttgaaaggcacaggtgttcttactgagtctaacaagaagtttctgcctttccaacaatttggcagagacattgctgacactactgatgctgtccgtgatccacagacacttgagattcttgacattacaccatgttcatttggtggtgtcagtgttataacaccaggaacaaatacttctaaccaggttgctgttctttatcagggtgttaactgcacagaagtccctgttgctattcatgcagatcaacttactcctacttggcgtgtttattctacaggttctaatgtatttcaaacacgtgcaggctgtttaataggagctgaatatgtcaacaactcatatgagtgtgacatacccattggtgcaggtatatgcgctagttatcagactcagactaagtctcatcggcgggcacgtagtgtagctagtcaatccatcattgcctacactatgtcacttggtgcagagaattcagttgcttactctaataactctattgccatacccacaaactttactattagtgttaccacagaaattctaccagtgtctatgaccaagacatcagtagattgtacaatgtacatttgtggtgattcaactgaatgcagcaatctattgttgcaatatggcagtttctgtacacaattaaagcgtgctttaactggaatagctgttgaacaagacaagaacacccaagaagtatttgcacaagtcaaacaaatttacaagacaccaccaattaagtatttcggtggatttaatttctcacaaatattaccagatccatctaaaccaagcaagaggtcatttattgaagatctactattcaacaaagtgacacttgcagatgctggcttcatcaaacaatatggtgattgccttggtgatattgctgctagagacctcatttgtgcacagaagtttaagggccttactgtattgccacctttgctcacagatgaaatgattgctcaatacacttctgcactgttagcgggtacaatcacttctggttggacctttggtgcaggtgctgcattacaaataccatttgctatgcaaatggcttataggtttaatggtattggagttacacagaatgttctctatgagaaccagaaattgattgccaaccaatttaatagtgctattggcaagattcaagactcactttcttccacagcaagtgcacttggtaaacttcaagatgtggtcaaccacaatgcacaagctttaaacacgcttgttaaacaacttagctccaagtttggtgcaatttcaagtgtattaaatgatatcttctcacgtcttgacaaagttgaggctgaagtgcaaattgataggttgatcacaggcagacttcaaagtttgcagacatatgtgactcaacaattaattagagctgcagaaatcagagcttctgctaatcttgctgctactaagatgtcagagtgtgtacttggacaatctaagagagttgatttctgtggaaagggctatcatcttatgtccttccctcagtcagcacctcatggtgtagtcttcttgcatgtgacttatgtccctgcacaagagaagaacttcacaactgctcctgccatttgtcatgatggtaaagcacactttcctcgtgaaggtgtctttgtttcaaatggcacacactggtttgtaacacaaaggaatttctatgaaccacaaatcattactacagacaacacatttgtgtctggtaactgtgatgttgtaataggaattgtcaacaacacagtttatgatcctttgcaacctgaattagactcattcaaggaggagttagataaatatttcaagaatcatacatcaccagatgttgatttaggtgacatctctggcattaatgcttcagttgtaaacattcagaaagaaattgaccgcctcaatgaggttgccaagaatttaaatgaatctctcatcgatctccaagaacttggaaagtatgagcagtatatcaaatggccatggtacatttggctaggtttcatagctggcttgattgccatagtaatggtgacaattatgctttgctgtatgaccagttgctgtagttgtctcaagggctgttgttcttgtggatcctgctgcaaatttgatgaagacgactctgagccagtgctcaaaggagtcaaattacattacacataa

SEQ ID NO: 26 - protein, 1270 aa, synthetic construct
MFVFLVLLPLVSSQCVNLTTRTQLPPAYTNSFTRGVYYPDKVFRSSVLHSTQDLFLPFFSNVTWFHVISGTNGTKRFDNPVLPFNDGVYFASIEKSNIIRGWIFGTTLDSKTQSLLIVNNATNVVIKVCEFQFCNDPFLDHKNNKSWMESEFRVYSSANNCTFEYVSQPFLMDLEGKQGNFKNLREFVFKNIDGYFKIYSKHTPIIVREPEDLPQGFSALEPLVDLPIGINITRFQTLLALHRSYLTPGDSSSGWTAGAAAYYVGYLQPRTFLLKYNENGTITDAVDCALDPLSETKCTLKSFTVEKGIYQTSNFRVQPTESIVRFPNITNLCPFDEVFNATRFASVYAWNRKRISNCVADYSVLYNLAPFFTFKCYGVSPTKLNDLCFTNVYADSFVIRGDEVRQIAPGQTGNIADYNYKLPDDFTGCVIAWNSNKLDSKVSGNYNYLYRLFRKSNLKPFERDISTEIYQAGNKPCNGVAGFNCYFPLRSYSFRPTYGVGHQPYRVVVLSFELLHAPATVCGPKKSTNLVKNKCVNFNFNGLKGTGVLTESNKKFLPFQQFGRDIADTTDAVRDPQTLEILDITPCSFGGVSVITPGTNTSNQVAVLYQGVNCTEVPVAIHADQLTPTWRVYSTGSNVFQTRAGCLIGAEYVNNSYECDIPIGAGICASYQTQTKSHRRARSVASQSIIAYTMSLGAENSVAYSNNSIAIPTNFTISVTTEILPVSMTKTSVDCTMYICGDSTECSNLLLQYGSFCTQLKRALTGIAVEQDKNTQEVFAQVKQIYKTPPIKYFGGFNFSQILPDPSKPSKRSFIEDLLFNKVTLADAGFIKQYGDCLGDIAARDLICAQKFKGLTVLPPLLTDEMIAQYTSALLAGTITSGWTFGAGAALQIPFAMQMAYRFNGIGVTQNVLYENQKLIANQFNSAIGKIQDSLSSTASALGKLQDVVNHNAQALNTLVKQLSSKFGAISSVLNDIFSRLDKVEAEVQIDRLITGRLQSLQTYVTQQLIRAAEIRASANLAATKMSECVLGQSKRVDFCGKGYHLMSFPQSAPHGVVFLHVTYVPAQEKNFTTAPAICHDGKAHFPREGVFVSNGTHWFVTQRNFYEPQIITTDNTFVSGNCDVVIGIVNNTVYDPLQPELDSFKEELDKYFKNHTSPDVDLGDISGINASVVNIQKEIDRLNEVAKNLNESLIDLQELGKYEQYIKWPWYIWLGFIAGLIAIVMVTIMLCCMTSCCSCLKGCCSCGSCCKFDEDDSEPVLKGVKLHYT

SEQ ID NO: 27 - DNA, 1251 bp, synthetic construct
  source 1..1251: mol_type = other DNA
atgtctgataacggaccacagaatcagcgaaacgcactacgcattacgtttggtggaccctcagattcaactggcagtaaccagaatggaggagcgcgatctaaacaacgtcggcctcaaggtttacccaataatactgcgtcttggttcaccgctctcactcaacatggcaaggaagaccttaaattccctcgaggacaaggcgttccaattaacaccaatagcagtccagatgaccaaattggctactaccgaagagctaccagacgaattcgtggtggtgacggtaagatgaaagatctcagtccaagatggtatttctactacctaggaactgggccagaagctggacttccctatggtgctaacaaagacggcatcatatgggttgcaactgagggagccttgaatacacctaaagatcacattggcacccgcaatcctgctaacaatgctgcaatcgtgctacaacttcctcaaggaacaacattgcctaaaggcttctacgcagaagggagcagaggcggcagtcaagcctcttctcgttcctcatcacgtagtcgcaacagttcaagaaattcaactccaggcagcagtaaacgaacttctcctgctagaatggctggcaatggcggtgatgctgctcttgctttgctgctgcttgacagattgaaccagcttgagagcaagatgtctggtaaaggccaacaacaacaaggccaaactgtcactaagaaatctgctgctgaggcttctaagaagcctcggcagaaacgtactgccactaaagcatacaatgtaacacaagctttcggcagacgtggtccagaacaaacccaaggaaactttggagaccaggaactaatcagacaaggaactgattacaaacattggccgcaaattgcacaatttgctcccagcgcttcagcgttcttcggaatgtcgcgcattggcatggaagtcacaccttcgggaacgtggttgacctacacaggtgccatcaaattggatgacaaagatccaaatttcaaagatcaagtcatattgctgaataagcatattgacgcatacaagacattcccaccaacagagcctaagaaggacaagaagaagaaggctgatgaaactcaagccttaccgcagagacagaagaaacagcaaactgtgactcttcttcctgctgcagatttggatgatttctccaaacaattgcaacaatccatgagcagtgctgactcaactcaggcctaa

SEQ ID NO: 28 - protein, 416 aa, synthetic construct
MSDNGPQNQRNALRITFGGPSDSTGSNQNGGARSKQRRPQGLPNNTASWFTALTQHGKEDLKFPRGQGVPINTNSSPDDQIGYYRRATRRIRGGDGKMKDLSPRWYFYYLGTGPEAGLPYGANKDGIIWVATEGALNTPKDHIGTRNPANNAAIVLQLPQGTTLPKGFYAEGSRGGSQASSRSSSRSRNSSRNSTPGSSKRTSPARMAGNGGDAALALLLLDRLNQLESKMSGKGQQQQGQTVTKKSAAEASKKPRQKRTATKAYNVTQAFGRRGPEQTQGNFGDQELIRQGTDYKHWPQIAQFAPSASAFFGMSRIGMEVTPSGTWLTYTGAIKLDDKDPNFKDQVILLNKHIDAYKTFPPTEPKKDKKKKADETQALPQRQKKQQTVTLLPAADLDDFSKQLQQSMSSADSTQA

SEQ ID NO: 29 - DNA, 3822 bp, synthetic construct
  source 1..3822: mol_type = other DNA
atgtttgtctttcttgtcttattgccactagtctctagtcagtgtgttaactttacaaacagaactcaattaccatctgcatacactaattctttcacacgtggtgtttattaccctgacaaagtattcagatcctcagtattacattcaactcaggacttgttcttacctttcttctccaatgttacttggttccatgctatacatgtctctgggaccaatggtactaagaggtttgataaccctgtcctaccatttaatgatggtgtttatttcgcttccactgagaagtctaacataataagaggctggatatttggtactactttagattcgaagacccagtccctacttattgttaataacgctactaatgttgttattaaagtctgtgaatttcaattctgtaattatccattcttgggtgtttattaccacaagaacaacaagagttggatggaaagtgagttcagagtttattctagtgcgaataattgcactttcgaatatgtctctcagcctttccttatggaccttgaaggtaaacagggtaatttcaagaatcttagcgaatttgtgtttaagaatattgatggttatttcaagatatattctaagcacacgcctattaatttagtgcgtgatctccctcagggtttctcggctttagaaccattggtagatttgccaataggtattaacatcactaggtttcaaactttacttgctttacatagaagttatttgactcctggtgattcttcttcaggttggacagctggtgctgcagcttattatgtgggttatcttcaacctaggactttcctattgaaatataatgagaatggaaccattacagatgctgtagactgtgcacttgaccctctctcagaaacaaagtgtacgttgaaatccttcactgtagagaaaggaatctatcaaacttctaactttagagtccaaccaacagaatctattgttagatttcctaatattacaaacttgtgccctttcggtgaagtatttaacgccaccagatttgcatctgtttatgcttggaacaggaagagaatcagcaactgtgttgctgattattctgtcctatataattccgcatcattctccacatttaagtgttatggagtgtctcctactaaattaaatgatctctgctttactaatgtctatgcagattcatttgtaattagaggtgatgaagtcagacaaatcgctccagggcaaactggaacgattgctgattataattataaattaccagatgactttacaggctgcgttatagcttggaattctaacaatcttgattctaaggttggtggtaattataattacctgtatagattgtttaggaagtctaatctcaaacctttcgagagagatatttcaactgaaatctatcaggccggtagcacaccttgtaatggtgttaaaggatttaattgttactttcctttacaatcatatggtttccaacccacttatggtgttggttaccaaccatacagagtagtagtactttcatttgaacttctacatgcaccagcaactgtttgtggacctaagaagtctactaatttggttaagaacaaatgtgtcaatttcaacttcaatggtttaacaggcacaggtgttcttactgagtctaacaagaagtttctgcctttccaacaatttggcagagacattgctgacactactgatgctgtccgtgatccacagacacttgagattcttgacattacaccatgttcatttggtggtgtcagtgttataacaccaggaacaaatacttctaaccaggttgctgttctttatcagggtgttaactgcacagaagtccctgttgctattcatgcagatcaacttactcctacttggcgtgtttattctacaggttctaatgtatttcaaacacgtgcaggctgtttaataggagctgaatatgtcaacaactcatatgagtgtgacatacccattggtgcaggtatatgcgctagttatcagactcagactaattctcctcggcgggcacgtagtgtagctagtcaatccatcattgcctacactatgtcacttggtgcagagaattcagttgcttactctaataactctattgccatacccacaaactttactattagtgttaccacagaaattctaccagtgtctatgaccaagacatcagtagattgtacaatgtacatttgtggtgattcaactgaatgcagcaatctattgttgcaatatggcagtttctgtacacaattaaaccgtgctttaactggaatagctgttgaacaagacaagaacacccaagaagtatttgcacaagtcaaacaaatttacaagacaccaccaattaaagatttcggtggatttaatttctcacaaatattaccagatccatctaaaccaagcaagaggtcatttattgaagatctactattcaacaaagtgacacttgcagatgctggcttcatcaaacaatatggtgattgccttggtgatattgctgctagagacctcatttgtgcacagaagtttaacggccttactgtattgccacctttgctcacagatgaaatgattgctcaatacacttctgcactgttagcgggtacaatcacttctggttggacctttggtgcaggtgctgcattacaaataccatttgctatgcaaatggcttataggtttaatggtattggagttacacagaatgttctctatgagaaccagaaattgattgccaaccaatttaatagtgctattggcaagattcaagactcactttcttccacagcaagtgcacttggtaaacttcaagatgtggtcaaccagaatgcacaagctttaaacacgcttgttaaacaacttagctccaactttggtgcaatttcaagtgtattaaatgatatcctttcacgtcttgacaaagttgaggctgaagtgcaaattgataggttgatcacaggcagacttcaaagtttgcagacatatgtgactcaacaattaattagagctgcagaaatcagagcttctgctaatcttgctgctattaagatgtcagagtgtgtacttggacaatctaagagagttgatttctgtggaaagggctatcatcttatgtccttccctcagtcagcacctcatggtgtagtcttcttgcatgtgacttatgtccctgcacaagagaagaacttcacaactgctcctgccatttgtcatgatggtaaagcacactttcctcgtgaaggtgtctttgtttcaaatggcacacactggtttgtaacacaaaggaatttctatgaaccacaaatcattactacagacaacacatttgtgtctggtaactgtgatgttgtaataggaattgtcaacaacacagtttatgatcctttgcaacctgaattagactcattcaaggaggagttagataaatatttcaagaatcatacatcaccagatgttgatttaggtgacatctctggcattaatgcttcatttgtaaacattcagaaagaaattgaccgcctcaatgaggttgccaagaatttaaatgaatctctcatcgatctccaagaacttggaaagtatgagcagtatatcaaatggccatggtacatttggctaggtttcatagctggcttgattgccatagtaatggtgacaattatgctttgctgtatgaccagttgctgtagttgtctcaagggctgttgttcttgtggatcctgctgcaaatttgatgaagacgactctgagccagtgctcaaaggagtcaaattacattacacataa

SEQ ID NO: 30 - protein, 1273 aa, synthetic construct
MFVFLVLLPLVSSQCVNFTNRTQLPSAYTNSFTRGVYYPDKVFRSSVLHSTQDLFLPFFSNVTWFHAIHVSGTNGTKRFDNPVLPFNDGVYFASTEKSNIIRGWIFGTTLDSKTQSLLIVNNATNVVIKVCEFQFCNYPFLGVYYHKNNKSWMESEFRVYSSANNCTFEYVSQPFLMDLEGKQGNFKNLSEFVFKNIDGYFKIYSKHTPINLVRDLPQGFSALEPLVDLPIGINITRFQTLLALHRSYLTPGDSSSGWTAGAAAYYVGYLQPRTFLLKYNENGTITDAVDCALDPLSETKCTLKSFTVEKGIYQTSNFRVQPTESIVRFPNITNLCPFGEVFNATRFASVYAWNRKRISNCVADYSVLYNSASFSTFKCYGVSPTKLNDLCFTNVYADSFVIRGDEVRQIAPGQTGTIADYNYKLPDDFTGCVIAWNSNNLDSKVGGNYNYLYRLFRKSNLKPFERDISTEIYQAGSTPCNGVKGFNCYFPLQSYGFQPTYGVGYQPYRVVVLSFELLHAPATVCGPKKSTNLVKNKCVNFNFNGLTGTGVLTESNKKFLPFQQFGRDIADTTDAVRDPQTLEILDITPCSFGGVSVITPGTNTSNQVAVLYQGVNCTEVPVAIHADQLTPTWRVYSTGSNVFQTRAGCLIGAEYVNNSYECDIPIGAGICASYQTQTNSPRRARSVASQSIIAYTMSLGAENSVAYSNNSIAIPTNFTISVTTEILPVSMTKTSVDCTMYICGDSTECSNLLLQYGSFCTQLNRALTGIAVEQDKNTQEVFAQVKQIYKTPPIKDFGGFNFSQILPDPSKPSKRSFIEDLLFNKVTLADAGFIKQYGDCLGDIAARDLICAQKFNGLTVLPPLLTDEMIAQYTSALLAGTITSGWTFGAGAALQIPFAMQMAYRFNGIGVTQNVLYENQKLIANQFNSAIGKIQDSLSSTASALGKLQDVVNQNAQALNTLVKQLSSNFGAISSVLNDILSRLDKVEAEVQIDRLITGRLQSLQTYVTQQLIRAAEIRASANLAAIKMSECVLGQSKRVDFCGKGYHLMSFPQSAPHGVVFLHVTYVPAQEKNFTTAPAICHDGKAHFPREGVFVSNGTHWFVTQRNFYEPQIITTDNTFVSGNCDVVIGIVNNTVYDPLQPELDSFKEELDKYFKNHTSPDVDLGDISGINASFVNIQKEIDRLNEVAKNLNESLIDLQELGKYEQYIKWPWYIWLGFIAGLIAIVMVTIMLCCMTSCCSCLKGCCSCGSCCKFDEDDSEPVLKGVKLHYT

SEQ ID NO: 31 - DNA, 1260 bp, synthetic construct
  source 1..1260: mol_type = other DNA
atgtctgataacggaccacagaatcagcgaaacgcaccacgcattacgtttggtggaccctcagattcaactggcagtaaccagaatggagaacgcagtggagcgcgatctaaacaacgtcggcctcaaggtttacccaataatactgcgtcttggttcaccgctctcactcaacatggcaaggaagaccttaaattccctcgaggacaaggcgttccaattaacaccaatagcagtcgagatgaccaaattggctactaccgaagagctaccagacgaattcgtggtggtgacggtaagatgaaagatctcagtccaagatggtatttctactacctaggaactgggccagaagctggacttccctatggtgctaacaaagacggcatcatatgggttgcaactgagggagccttgaatacacctaaagatcacattggcacccgcaatcctgctaacaatgctgcaatcgtgctacaacttcctcaaggaacaacattgcctaaaggcttctacgcagaagggagcagaggcggcagtcaagcctcttctcgttcctcatcacgtagtcgcaacagttcaagaaattcaactccaggcagcagtaaacgaacttctcctgctagaatggctggcaatggcggtgatgctgctcttgctttgctgctgcttgacagattgaaccagcttgagagcaagatgtctggtaaaggccaacaacaacaaggccaaactgtcactaagaaatctgctgctgaggcttctaagaagcctcggcagaaacgtactgccactaaagcatacaatgtaacacaagctttcggcagacgtggtccagaacaaacccaaggaaactttggagaccaggaactaatcagacaaggaactgattacaaacattggccgcaaattgcacaatttgctcccagcgcttcagcgttcttcggaatgtcgcgcattggcatggaagtcacaccttcgggaacgtggttgacctacacaggtgccatcaaattggatgacaaagatccaaatttcaaagatcaagtcatattgctgaataagcatattgacgcatacaagacattcccaccaacagagcctaagaaggacaagaagaagaaggctgatgaaactcaagccttaccgcagagacagaagaaacagcaaactgtgactcttcttcctgctgcagatttggatgatttctccaaacaattgcaacaatccatgagcagtgctgactcaactcaggcctaa

SEQ ID NO: 32 - protein, 419 aa, synthetic construct
MSDNGPQNQRNAPRITFGGPSDSTGSNQNGERSGARSKQRRPQGLPNNTASWFTALTQHGKEDLKFPRGQGVPINTNSSRDDQIGYYRRATRRIRGGDGKMKDLSPRWYFYYLGTGPEAGLPYGANKDGIIWVATEGALNTPKDHIGTRNPANNAAIVLQLPQGTTLPKGFYAEGSRGGSQASSRSSSRSRNSSRNSTPGSSKRTSPARMAGNGGDAALALLLLDRLNQLESKMSGKGQQQQGQTVTKKSAAEASKKPRQKRTATKAYNVTQAFGRRGPEQTQGNFGDQELIRQGTDYKHWPQIAQFAPSASAFFGMSRIGMEVTPSGTWLTYTGAIKLDDKDPNFKDQVILLNKHIDAYKTFPPTEPKKDKKKKADETQALPQRQKKQQTVTLLPAADLDDFSKQLQQSMSSADSTQA

SEQ ID NO: 33 - DNA, 171625 bp, synthetic construct
  source 1..171625: mol_type = other DNA
ttttatgagaccatcaaagagagaaagagaataaaaatattttttatgagaccatcaaagagagaaagagaataaaaatattttatgagaccatcaaagagagaaagagaataaaaatattttttatgagaccatcaaagagagaaagagaataaaaatattttatgagaccatcaaagagagaaagagaataaaaatattttttatgagaccatcaaagagagaaagagaataaaaatatttttgtatgagaccatcagaaagaggtttaatatttttgtgataccctgaaaggaaataggaatagtgtcataatcgtatcacactattgagacagaaaaagaagaagtcgcgagaggtaactttttgttttgcaaaccggaatatagtgtccggtacacttttttaattcgtggtgtgcctgaatcgttcgattaaccctactcatccaatttcagatgaatagagttatcgattcagacacacgctttgagttttgttgaatcgatgagtgaagtatcatcggttgcaccttcagatgccgatccgtcgacatacttgacctcaagttcagatgattccttgcacatgtctccgatacgaacgctaaactctagattcttgacacattttgtatcgacgatcgttgaaccgatgatatcttcgtaactcactttcttatgagagatgttagacccgagtactggatgggtcttgatgtcgctgtctttctcttcttcgctacatctgatgtcgatagacacctcacagtctttccatcagcggattctgagatggatttaatctgaggacatttggtgaatccaaagttcattctcagacctccaccgatgatggagtaataagtggtaggaggatctacatcctcgactgattccacctcgggatctggatctgactcggactctgtaatttccgttacggattggcaaatcttatcatcggtcggtgtttggtcttgctttgtgactttgataataacatcgattcccatatgatgtttgttttcttcttccgtacacgatgaggatgattgctgaagactggcaggcacatgcatgccagtacgatatattgtttcatgattgctattgattgagtactgttctttatgattctacttccttaccgtgcaataaattagaatatattttctacttttacgagaaattaattattgtatttatgggtgaaaaacttactataaaaagcgggtgggtttggaattagtgatcagtttatgtatatcgcaactaccgggcatatggctacattacccacatgataagagattgtatcagtttcgtagtcttgagtattggtattactatatagtatatagatgtcgacgctagagttactgtctccgaatgcggcatgatagtatcattctttgctttcgttaactgtttggaggaagaatctttgttattgcatttaatctcgaaattcagagtgcacacctttctcctgtaaagaaacctgaagtcgctaccttattaagaagacgggatcgcagtctttatgattcatagtaatagttagttccgacgttgagatggattcgctgagaccggtagtggtcgtccgagtacacgatgtgtcgttaactggatacaggttaatttccacatcgatatagttaaaggtatttctgggtacgggttcgcatttatctgcggaagagacggtgtgagaatatgttccgagaccacacggagaacagatgacgtctccggatactccgtatcctattccacattttgtttgggaaacacatgccttgcatccatgatcgggagagcattcacagattctattgtgagtcgtgttacacgatcgcgtcgacattgttgacagaaacgtgaccttcattcttaccgtcgtccataaatacgttaggtatgtaccacatactgtcgcgaacgatgcgtccatctcataatgatttactttttcataattaaagatgtgaaagaaaaccgaacaatatatttttttagtaatgtttatgcgagacatataaaataaactccgtgtttatgatgccggtaaatgtttttatcatcttggacggaatcgattttgtaatatgccatggaaacaggacattatcactccatgataaattatttaatggagtcgatcctctcattgttctttgcgtatctcaatctgtggcgtttgcttcgtttaaataatatatcaaacatggagacgcctgatatgtaggcattcttcattctattaatgtctgctctatagcgctttagttccttatgacgaccggcgatatcatacttactttagaaggaaaatcatcatctaggattaaggcgtatctgatacaggcgaataatggttcaggatatagatagcgtatatctctattaaatgcgtcaatcatagtctctagagtgggatggtaactcagtaataaatcaactagcttctctttggtaactgcttttctggatggccgtattgattatcgagcgtgacactcgctccatattccaataaccgctttgcaaattgtatattattgacatcgaccgcgtaatatagtagagttatcgatcatatctatatcatccatgtacttgcttagtatatcaaatacatcttcataacagtgatacccgcaattattaaatctcgataatatcagaccgtacatacatagacggccattgttagatatgtgatttacagccgcgtgtccatattttccacgataaaccttacgacgtttacatcgacgagattattattaacaaagttgttgtccgtcgtcttatccaacatgcattgaatgataggtatacttaccatatcgccgtaatgtaagtagtttatcagtatggcttgtacgatggattcatcctgttgtctaaatctctttagaatgttatcgatgatgtagtggttatattctctggaatcgtacgaagtaatactacgcattacgtcgacaagagtatgacgtctctcaataagaagattaacgatttccatgtctacattatatggggttactctaaatcgcttgtttagataatacgcctctaatatagggctgacgtcgtatactctacacgtgtccacatcctttattaataatctctatatctatggttgagcaagaccagtagtattggatggaaacattgttatcgatcaaacatttaattacatccttggatagagattctctatgagacgatatatagtaatgaagagagttcttacacatatcactgttgtacatacaggtacgaaatacgtaaccggtgctgtaacattctgatttaagaagccatagcaatacttctggtctcggattaggcgtcgttacgtatatatccaccaatccgagaccattgattgcataattcgtattcttggacggacgtatccgtttatccacaattaggtattttagcagacgtaagtcgaaatcatttatattcgacttgagttcgttagaggaattcgaatagctggatatcagtagatgcacaatctgagattttacgtatctatgcttactgtatgctcctagcggagttaatccttcgttgtttctacaaagtctctcgactccgcgagagagtaacagtcgaacaatcttaatgtctgtatcgcatttattggagacgtaacaatgtagcgcattgtttcctcgtctatctatatgttttgataagttgtgacacgtttcaatttctagttttatttttttgtacgtcacatcttcatccagtagacgacatagaatacatgtgcaatccatagctattctggtgctaattattcctcataagatgataaaaagtgtagtgagagagcatgaaggagatttagtatttagcagtgcggatatgatccaagagggtgagatagtcgttctcgttcagaatctttcgcagcataagtagtatgtcgatatacttatcgttgaagactcttccagagacgatagctgattgagtacaaagtccaatgattgcacgaagttcttcggcggttttcatggagtcatttctgatgaaacatttaatgatctaaatttcagtttatgtttgtaccccgtattcatacttaacaaattggtattacataccattaataatgcaagcataaaaaatcgttagtagatgtttctaaatataggttccgtaagcaaagaatataagaatgaagcggtaatgataaaatcaatcgttatctaaaatgatcatactcatttattttattctattatattaacacatacatttttaacagcaacacattcaatattgtattgttatttttatattatttacacaattaacaatatattattagtttatattactgaattaataatataaaattcccaatcttgtcataaacacacactgagaaacagcataaacacaaaatccatcaaaaatgttgataaattatctgatgttgttgttcgctgctatgataatcagatcattcgccgatagtggtaacgctatcgaaacgacatcgccagaaattacaaacgctacaacagatattccagctatcagattatgcggtccagagggagatggatattgtttacacggtgactgtatccacgctagagatatcgacggtatgtattgtagatgctctcatggttatacaggcattagatgtcagcatgtagtattagtagactatcaacgttcagaaaaaccaaacactacaacgtcatatatcccatctcccggtattatgcttgtattagtaggcattattattattacgtgttgtctattatctgtttataggttcactcgacgaactaaactacctatacaagatatggttgtgccataatttttataaattttttttatgagtatttttacaaaaatgtataaagtgtatgtcttatgtatatttataaaaatgctaaatatgcgatgtatctatgttatttgtatttatctaaacaatacctctacctctagatattatacaaaaattttttatttcggcatattaaagtaaaatctagttaccttgaaaatgaatacagtgggtggttccgtatcaccagtaagaacataatagtcgaatacagtatccgattgagattttgcatacaatactagtctagaaagaaatttgtaatcatcttctgtgacgggagtccatatatctgtatcatcgtcccatgctatattcctgttatcatcattagttaatgaaaataactctcgtgcttcagaaaagtcaaatattgtatccatacatacatctccaaaactatcgcttatacgtttatctttaacgatacctatacctagatggttatttactaacagacattttccagatctattgactataactcctatagtttccacatcaaccaagtaatgatcatctattgttatataacaataacataactcttttccgtttttatcagtatgtatatctatatcaacgtcgtcgttgtagtgaatagtagtcattgatctattatatgaaacggatatgtctagaacggcaattgttttacgtccagttaacactttcgttgatttaaagtctagagtctttgcaaacataatatccttatccgactttatatttcctgtagggtggtataattttattttgcctccacatatcggtgtttccaaatatattactagacaatattccatatagttattagttaagggtacccaattagaacacgtacgcttattatcatcatttggatcgtatttcataaaagttattgtactatcgatgtcaacacattctacattttttaatcgtctatatagtatttttctgatattttctataatatcagaattgtcttccatcggaagttgtatactatcggaatcagttacatgtttaaataattctctgatgtcattccttatacaatcaaattcattattaaacagtttaatagtctgtagacctttatcgtcgtaaatatccattgtcttattagttacgcttatttttatgtgtttttacgttgctttattatattttataagaatgattgtttgacgaatcacgagaactattaagacacattattaggtatatattataaaaaagtttttgattacgatgttataagaggaaagaggacacattaacatcatacatcaattaactacattcttataacatcgtaatcaaaagaattgcaattttgatgtataacaactgtcaatgggttatggaattgtatattacatattatacggtatgttggtaacgacaaataccgatcggtaattgtctgccggtgtaatagaattatatatatctatctattacaccggccttgtatacataataataagttgtggtagtatgatctccatatttataatttaggactttgtattcagtttttttggaatcataaaaaataaaaaaaagttttactaatttaaaattatttacatttttttcactgtttagtcgcggatatggaattcgatcctgccaaaatcaatacatcatctatagatcatgtaacaatattacaatacatagatgaaccaaatgatataagactaacagtatgcattatcacaaaaataaatccacatttggctaatcaatttcgggcttggaaaaaacgtatcgccggaagggactatatgactaacttatctagagatacaggaatacaacaatcaaaacttactgaaactgtcaaaaaaatagaaacatatatggtctatatatacactacaatttagttattaattggataaccgatgtgattatcaatcaatattaagaaggttggtaaattggtacatagctaataatacctatacacccaataatacaacaaccatttctgagttggatatcatcaaaatactggataaatacgaggacgtgtatagagtaagtaaagaaaaagaatgtgaaatttgctatgaagttgtttactcaaaacgatagatactttggtttattggattcgtgtaatcatatattttgcataacatgcatcaatatatggcatagaacacgaagagaaaccggtgcgtcggataattgtcctatatgtcgtacccgttttagaaacataacaatgagcaagttaactaataaataaaaagtttaatttgttgacgacgtatgtcgttattttttctcgtataaaagattaatttgattctaatataatctttagtattggataaatatcaattcaaattaattccattagattatatcataaataaaaatagtagcacgcactacttcagccaaatattcttttttgaaacgccatctatcgtagtgaggacacaagtgaacctataatgagcaaatttattagtatcggttacatgaaggactttacgtagagtggtgattccactatctgtggtacgaacggtttcatcttctttgatgccatcacccagatgttctataaacttggtatcctttgccaaccaatacatatagctaaactcaggcatatgttccacacatcctgaacaatgaaattctccagaagatgttacaatgtctagatttggacatttggtttcaaccgcgttaacatatgagtgaacacacccatacatgaaagcgatgagaaataggattttcatcttgccaaaatatcactagaaaaaatttatttatcaattttaaaggtataaaaaatacttattgttgctcgaatattttgtatttgatggtatacggaagattagaaatgtaggtattatcatcaactgattctatggttttatgtattctatcatgtttcactattgcgttggaaataatatcatatgcttccacatatattttattttgttttaactcataatactcacgtaattctggattattgacatatctatgaataattttagctccatgatcagtaaatattaatgagaacatagtattaccacctaccattatttttttcatctcattcaattcttaattgcaaagatctatataatcattatagcgttgacttatggactctggaatcttagacgatgtacagtcatctataatcatggcatatttaatacattgttttatagcatagtcgttatctacgatgttagatatttctctcaatgaatcaatcacacaatctaatgtaggtttatgacataatagcattttcagcagttcaatgtttttagattcgttgatggcaatggctatacatgtatatccgttatttgatctaatgttgacatctgaaccggattctagcagtaaagatactagagattgtttattatatctaacagccttgtgaagaagtgtttctcctcgtttgtcaatcatgttaatgtctttaagataaggtaggcaaatgtttatagtactaagaattgggcaagcataagacatgtcacaaagaccctttttgtatgtataagtgtaaaaattataacattcatagttggatttacataggtgtccaatcgggatctctccatcatcgagataattgatggcatctcccttccttttttagtagatatttcatcgtgtaagaatcaatattaatatttctaaagtatccgtgtatagcctctttatttaccacagttccatattccactagagggatatcgccgaatgtcatatactcaattagtatatgttggaggacatccgagttcattgttttcaatatcaaaaagatggtttccttatcatttctccatagtggtacaatactacacattattccgtgcggctttccattttccaaaaacaatttgaccaaatctacatctttattgtatctataatcactatttagataatcagccataattactcgagtgcaacatgttagatcgtctatatatgaataagccgtgttatctattcctttcattaacaatttaacgatgtctatatctatatgagatgacttaatataatattgaagagctgtacaatagtttttatctataaaagacggcttgattccgtgattaattagacatttaacaacttccggacgcacatatgctctcgtatccgactctgaatacagatgagagatgatatacagatgcaatacggtaccgcaatttcgtagttgataatcatcatacgcgtatcagtactcgtcctcataaagaacactgcagccattttctatgaacaaatcaataatttcaggaacaggatcatctgtcattacataattttctataactgaacgatggttttcacatttaacactcaagtcaaatccatgttctaccaacacctttatcaagtcaacgtctacatttttggatttcatatagctgaatatattaaagtcatttatgttgctaaatccagtggcttctagtagagccatcgctatatcctttaactttaacatgtctactatttgtgtattcttctaatggggtagctgtctccaatttttgcgtaatggattagtgccactgtctagtagtagtttgacgacctcgacattattacaatgctcattaaaaaggtatgcgtgtaaagcattattcttgaattggttcctggtatcattaggatctctgtctctcaacatctgtttaagttcatcgagagccacctcctcattttccaaatagtcaaacattttgactgaatgagctactgtgaactctatacacccacacaactaatgtcattaaatatcatgtcaaaaacttgtacaattattaataaaaataatttagtgtttaaattttaccagttccagattttacacctccgttaaccccactttttacaccactggacgatcctcctccccacattccaccgccaccagatgtataagttttagatcctttattactaccatcatgtccatggataaagacactccacatgccgccactaccccctttagaagacatattaataagacttaaggacaagtttaacaataaaattaatcacgagtaccctactaccaacctacactattatatgattatagtttctatttttacagtaccttaactaaagtctctagtcacaagagcaatactaccaacctacactattatatgattatagtttctatttttataggaacgcgtacgagaaaatcaaatgtctaatttctaacggtagtgttgataaacgattatcgtcaatggatacctcctctatcatgtcgtctattttcttactttgttctattaacttattagcattatatattatttgattataaaacttatattgcttattagcccaatctgtaaatatcggattattaacatatcgtttctttgtaggtttatttaacatgtacatcactgtaagcatgtccgtaccatttattttaatttgacgcatatccgcaatttctttttcgcagtcggttataaattctatatatgatggatacatgctacatgtgtacttataatcgactaatatgaagtacttgatacatattttcagtaacgatttattattaccacctatgaataagtacctgtgatcgtctaggtaatcaactgttttcttaatacattcgatggttggtaatttactcagaataatttccaatatcttaatatataattctgctatttctgggatatatttatctgccagtataacacaaatagtaatacatgtaaacccatattttgttattatattaatgtctgcgccattatctattaaccattctactaggctgacactatgcgacttaatacaatgataaagtatactacatccatgtttatatcatcaatatacggcttacaaagttttagtatcgataacacatccaactcacgcatagagaaggtagggaataatggcataatatttattaggttatcatcattgtcattatctacaactaagtttccattttttaaaatatactcgacaactttaggatctctattgccaaatttttgaaaatatttatttatatgcttaaatctatataatgtagctccttcatcaatcatacatttaataacattgatgtatactgtatgataagatacatattctaacaatagatcttgtatagaatctgtatatcttttaagaattgtggatattattacgtaaactattacacaattctaaaatataaaacgtatcacggtcgaataatagttgatcaactatataattatcgattttgtgatttttcttcctaaactgtttacgtaaatagttagatagaatattcattagttcatgaccactatagttactatcgaataacgcgtcaaatatttcccgtttaatatcgcatttgtcaagataataatagagtgtggtatgttcacgataagtataataacgcatctctttttcgtgtgaaattaaatagtttattacgtccaaagatgtagcataaccatcttgtgacctagtaataatataataatagagaactgttttacccattctatcatcataatcagtggtgtagtcgtaatcgtaattgtctaattcatcatcccaattataatattcaccagcacgtctaatctgttctattttgatcttgtatccatactgtatgttgctacatgtaggtattcctttatccaataatagtttaaacacatctacattgggatttgatgttgtagcgtatttttctacaatattaataccatttttgatactatttatttctatacctttcgaaattagtaatttcaataagtctatatcgatgttatcagaacatagatattcgagtatatcaaaatcattgatatttttatagtcgactgacgacaataacaaaatcacaacatcgtttttgatattattatttttcttggtaacgtatgcctttaatggagtttcaccatcatactcatataatggatttgcaccactttctatcaatgattgtgcactgctggcatcgatgttaaatgttttacaactatcatagagtatcttatcgttaaccatgattggttgttgatgctatcgcattttttggtttctttcatttcagttatgtatggatttagcacgtttgggaagcatgagctcatatgatttcagtactgtagtgtcagtactattagtttcaataagatcaatctctagatctatagaatcaaaacacgataggtcagaagataatgaatatctgtaggcttcttgttgtactgtaacttctcgttttgttagatgtttgcatcgtgctttaacatcaatggtacaaattttatcctcgctttgtgtatcatattcgtccctactataaaattgtatattcagattatcatgagatgtgtatacgctaacggtatcaataaacggagcacaccatttagtcataaccgtaatccaaaaatttttaaagtatatcttaacgaaagaagttgtgtcattgtctacggtgtatggtactagatcctcataagtgtatatatctagagtaatgtttaatttatcaaatggttgataatatggatcctcatgacaatttccgaagatggaaatgagatatagacatgcaataaatctaattgcggacatggttactccttaaaaaaatacgaataatcaccttggctatttagtaagtgtcatttaacactatactcatattaatccatggactcataatctctatacgggattaacggatgttctatatacggggatgagtagttttcttctttaactttatactttttactaatcatatttagactgatgtatgggtaatagtgtttaaagagttcgttctcatcatcagaataaatcaatatctctgtttttttgttatacagatgtattacagcctcatatattacgtaatagaacgtgtcatctaccttattaactttcaccgcatagttgtttgcaaatacggttaatcctttgacctcgtcgatttccgaccaatctgggcgtataatgaatctaaactttaatttcttgtaatcattcgaaataatttttagtttgcatccgtagttatcccctttatgtaactgtaaatttctcaacgcgatatctccattaataatgatgtcgaattcgtgctgtatacccatactgaatggatgaacgaataccgacggcgttaatagtaatttactttttcatctttacatattgggtactagttttactatcataagtttataaattccacaagctactatggaataagccaaccatcttagtataacacacatgtcttaaagtttattaattaattacatgttgttttatatatcgctacgaatttaaacagagaaatcagtttaggaaaaaaaaatatctatctacatcatcacgtctctgtattctacgatagagtgctactttaagatgagacatatccgtgtcatcaaaaatatactccattaaaatgattattccggcagcgaacttgatattggatatatcacaacctttgttaatatctacgacaatagacagcagtcccatggttccataaacagtgagtttatctttctttgaagagatattttgtagagatcttataaaactgtcgaatgacatcgcatttatatctttagctaaatcgtatatgttaccatcgtaatatctaaccgcgtctatcttaaacgtttccatcgctttaaagacgtttccgatagatggtctcatttcatcagtcatactgagccaacaaatataatcgtgtataacatctttgatagaatcagactctaaagaaaacgaatcggctttattatacgcattcatgataaacttaatgaaaaatgtttttcgttgtttaagttggatgaatagtatgtcttaataattgttattatttcattaattaatatttagtaacgagtacactctataaaaacgagaatgacataactagttatcaaagtgtctaggacgcgtaattttcatatggtatagatcctgtaagcattgtctgtattctggagctattttctctatatctaatttctgaacgttcaccaatgtctctagccactttggcactaatagcgatcattcgcttagcgtcttctatattattaactggttgattcaatctatctagcaatggaccgtcggacagcgtcattctcatgttcttaatcaatgtacatacatcgccgtcatctaccaattcatccaacaacataagctttttaaaatcatcattataataggtttgatcgttgtcatttctccaaagaatatatctaataagtagagtcctcatgattagttaacaactattttttatgttaaatcaattagtacaccgctatgtttaatacttattcatattttagtttttaggattgagaatcaatacaaaaattaatgcatcattaattttagaaatacttagtttccacgtagtcaatgaaacatttgaactcatcgtacaggacgttctcgtacaggacgtaactataaaccggtttatatttgttcaagatagatacaaatccgataactttttttacgaattctacgggatccactttaaaagtgtcataccgggttctttttatttttttaaacagattaatggtgtgatgttgattaggtcttttacgaatttgatatagaatagcgtttacatattctccataatggtcaatcgccatttgttcgtatgtcataaattctttaattatatgacactgtgtattatttagttcatccttgttcatcattaggaatctatccaatatggcaattatactagaactataggtgcgttgtatacacatattgatgtgtctgtttatacaatccatgctactaccttcgggtaaaattgtagcatcatataccatttctagtactttaggttcattgttatccattgcagaggacgtcatgaacgcatcctaaaaaaatatattatttttatgttattttgttaaaaataatcatcgaatacgaactagtataaaaaggcgcgccttaggcctgagttgagtcagcactgctcatggattgttgcaattgtttggagaaatcatccaaatctgcagcaggaagaagagtcacagtttgctgtttcttctgtctctgcggtaaggcttgagtttcatcagccttcttcttcttgtccttcttaggctctgttggtgggaatgtcttgtatgcgtcaatatgcttattcagcaatatgacttgatctttgaaatttggatctttgtcatccaatttgatggcacctgtgtaggtcaaccacgttcccgaaggtgtgacttccatgccaatgcgcgacattccgaagaacgctgaagcgctgggagcaaattgtgcaatttgcggccaatgtttgtaatcagttccttgtctgattagttcctggtctccaaagtttccttgggtttgttctggaccacgtctgccgaaagcttgtgttacattgtatgctttagtggcagtacgtttctgccgaggcttcttagaagcctcagcagcagatttcttagtgacagtttggccttgttgttgttggcctttaccagacatcttgctctcaagctggttcaatctgtcaagcagcagcaaagcaagagcagcatcaccgccattgccagccattctagcaggagaagttcctctactgctgcctggagttgaatttcttgaactgttgcgactacgtgatgaggaacgagaagaggcttgactgccgcctctgctcccttctgcgtagaagcctttaggcaatgttgttccttgaggaagttgtagcacgattgcagcattgttagcaggattgcgggtgccaatgtgatctttaggtgtattcaaggctccctcagttgcaacccatatgatgccgtctttgttagcaccatagggaagtccagcttctggcccagttcctaggtagtagaaataccatcttggactgagatctttcatcttaccgtcaccaccacgaattcgtctggtagctcttcggtagtagccaatttggtcatctggactgctattggtgttaattggaacgccttgtcctcgagggaatttaaggtcttccttgccatgttgagtgagagcggtgaaccaagacgcagtattattgggtaaaccttgaggccgacgttgtttagatcgcgctccactgcgttctccattctggttactgccagttgaatctgagggtccaccaaacgtaatgcgtggtgcgtttcgctgattctgtggtccgttatcagacatggtggcggcgtttatcttatttatgattatttctcgctttcaatttaacacaaccctcaagaacctttgtatttattttcaatttttgaatcatccagtccactgaatagcaaaatctttactattttggtatcttccaatgtggctgcctgatgtaatggaaattcattctctagaagatttttcaatgctccagcgttcaacaacgtacatactagacgcacgttattatcagctattgcataatacaaggcactatgtccatggacatccgccttaaatgcatctttgctagagagaaagcttttcagctgcttagacttccaagtattaattcgtgacagatccatgtctgaaacgagacgctaattagtgtataatttttgtcatattgcaccagaattaataatatctctaatagatctgattagtagatacatggctatcgcaaaacaacatatacacatttaataaaaataatatttattaagaaaattcagatttcacgtacccatcaatataaataaaataatgattccttacaccgtacccatattaaggagattctaccttacccataaacaatataaatccagtaatatcatgtctgatgatgaacacaaatggtgtattaaattccagtttttcaggagatgatctcgccgtagctaccataatagtagatgcctctgctacagttccttgttcgtcgacatctatctttgcattctgaaacattttataaatatataatgggtccctagtcatatgtttaaacgacgcattatctggattaaacatactaggagccatcatttcggctatcgacttaatatccctcttattttcgatagaaaatttagggagtttaagattgtacactttattccctaattgaaacgaccaatagtctaattttgcagccgtaatagaatctgtgaaatgggtcatattatcacctattgccaggtacatactaatattagcatccttatacggaaggcgtaccatgtcatattctttgtcatcgattgtgattgtatttccttgcaatttagtaactacgttcatcatgggaaccgttttcgtaccgtacttattagtaaaactagcattgcgtgttttagtgatatcaaacggatattgccatatacctttaaaatatatagtattaatgattgcccatagagtattattgtcgagcatattagaatctactacattagacataccggatctacgttctactatagaattaattttattaaccgcatctcgtctaaagtttaatctatataggccgaatctatgatattgttgataatacgacggtttaatacacacagtattatctacgaaactttgataagttagatcagtgtacgtatatttagatgttttcagcttagctaatcctgatattaattctgtaaatgctggacccagatctctttttctcaaatccatagtcttcaataattctattctagtattacctgatgcaggcaatagcgacataaacatagaaaacgaataaccaaacggtgagaagacaatattatcatcttgaatatttttatacgctactataccggcattggtaaatccttgtagacgataggtagacgctgaacacgttaacgatagtatcaataacgcaatcatgattttatggtattaataattaaccttatttttatgttcggtataaaaattattgatgtctacacatccttttgtaattgacatctatatatccttttgtataatcaactctaatcactttaacttttacagttttccctaccagtttatccctatattcaacatatctatccatatgcatcttaacactctctgccaagatagcttcagagtgaggatagtcaaaaagataaatatatagagcataatcattctcgtatactctgccctttattacatcgcccgcattgggcaacgaataacaaaatgcaagcatcttgttaacgggctcgtaaattgggataaaaattatgtttttatatctattttattcaagagaatattcaggaatttctttttccggttgtatctcatcgcagtatatatcatttgtacattgtttcatattttttaatagtttacaccttttagtaggactagtatcgtacaattcatagctgtattttgaattccaatcacgcataaaaatatcttctaattgttgacgaagacctaatccatcatccggtgtaatattaatagatgctccacatgtatccgtaaagtaatttcctgtccaatttgaggtacctatataggccgttttatcggttaccatatatttggcatggtttaccctagaatacggaatgggaggatcagcatctggtacaataaatagctttacttctatatttatgtttttagattttagcatagcgatagatcttaaaaagtttctcatgataaacgaagatcgttgccagcaactaatcaatagcttaacggatacttgtctgtctatagcggatcttcttaattcatcttctatataaggccaaaacaaaattttacccgccttcgaataaataatagggataaagttcataacagatacataaacgaatttactcgcatttctaatacatgacaataaagcggttaaatcattggttctttccatagtacatagttgttgcggtgcagaagcaataaatacagagtgtggaacaccacttacgttaatactaagaggatgatctgtattataatacgacggataaaagtttttccaattatatggtagattgttaactccaagataccagtatacctcaaaaatttgagtgagatccgctgccaagttcctattattgaagatcgcaatacccaattctttgacctgagttagtgatctccaatccatgttagcgcttcctaaataaatatgtgtattatcagatatccaaaattttgtatgaagaactcctcctaggatatttgtaatatctatgtatcgtacttcaactccggccatttgtagtctttcaacatcctttaatggtttgttagatttattgacggctactctaactcgtactcctcttttgggtaattgtacaatctcgtttaatattatcgtgccgaaattcgtacccacttcatccgataaactccaataaaaagatgatatatctagtgtttttgtggtattggatagaatttccctccacatgttaaatgtagacaaatatactttatcaaattgcatacctataggaatagtctctgtaatcactgcgattgtattatccggattcattttatttgttaaaagaataatcctatatcacttcactctattaaaaatccaagtttctatttctttcatgactgattttttaacttcatccgtttccttatgaagatgatgtttggcaccttcataaatttttatttctctattacaatttgcatgttgcatgaaataatatgcacctaaaacatcgctaatctcattgtttgttccctggagtatgagagtcggggtgttaatcttggaaattatttttctaaccttgttggtagccttcaagacctgactagcaaatccagccttaattttttcatgattgattaatgggtcgtattggtatttataaactttatccatatctctagatactgattctggacatagctttccgactggcgcatttggtgtgatggttcccataagtttggcagctagcagattcagtcttgaaacagcatctgcattaactagaggagacattagaatcattgctgtaaacaagtttggattatcgtaagaggctagtatagaaattgttgctcccatggaatgacccaataagtagatttaatagttaccacgtgctgtaccaaagtcatcaatcatcattttttcaccattacttcttccatgtccaatatgatcatgtgagaatactaaaattcctaacgatgatatgttttcagctagttcgtcataacgtccagaatgtttaccagctccatgacttatgaatactaatgccttaggatatgtaatcattgtccagattgaacatacagtttgcactcatgattcacgttatataactatcaatattaacagttcgtttgatgatcatattatttttatgttttattgataattgtaaaaacatacaattaaatcaatatagaggaaggagacggctactgtcttttgtgagatagtcatggcgactaaattagattatgaggatgctgttttttactttgtggatgatgataaaatatgtagtcgcgactccatcatcgatctaatagatgaatatattacgtggagaaatcatgttatagtgtttaacaaagatattaccagttgtggaagactgtacaaggaattgatgaagttcgatgatgtcgctatacggtactatggtattgataaaattaatgagattgtcgaagctatgagcgaaggagaccactacatcaattttacaaaagtccatgatcaggaaagtttattcgctaccataggaatatgtgctaaaatcactgaacattggggatacaaaaagatttcagaatctagattccaatcattgggaaacattacagatctgatgaccgacgataatataaacatcttgatactttttctagaaaaaaaattgaattgatgatataggggtcttcataacgcataattattacgttagcattctatatccgtgttaaaaaaaattatcctatcatgtatttgagagttttatatgtagcaaacatgatagctgtgatgccaataagctttagatattcacgcgtgctagtgttagggatggtattatctggtggtgaaatgtccgttatataatctacaaaacaatcatcgcatatagtatgcgatagtagagtaaacatttttatagtttttactggattcatacatcgtctacccaattcggttatgaatgaaattgtcgccaatcttacacccaaccccttgttatccattagtatagtattaacttcgttatttatgtcataaactgtaaatgattttgtagatgccatatcatacatgatattcatgtccctattataatcattactaactttatcacaatatatgttgataatatctatatatgatctagtctttgtgggcaactgtctatacaagtcgtctaaacgttgtttactcatatagtatcgaacagccatcattacatggtcccgttccgttgatagataatcgagtatgttagtggacttgtcaaatctatataccatattttctggaagtggatatacatagtcgtgatcaacattattgctagcctcatcttctatatcctgtactataccatctacataatctacgatattattacacataaacatcgacaacatactattgtttattatctaagtcctgttgatccaaacccttgatctcctctatttgtactatctagagattgtacttcttccagttctggataatatatacgttgatagattagctgagctattctatctccagtatttacattaaacgtacattttccattattaataagaatgactcctatgtttcccctataatcttcgtctattacaccacctcctatatcaatgccttttagtgacagaccagacctaggagctattctaccatagcaaatcttaggcatggacatactaatatctgtcttaattaactgtctttctcctggagggatagtataatcgtaagcgctatacaaatcatatccggcagcacccggcgattgcctagtaggagatttagctctgttagtttccttaacaaatctaactggtgagttaatattcatgttgaacataaaactaatattttatttcaaaattatttaccatcccatatattccatgaataagtgtgatgattgtacacttctatagtatctatatacgattcacgataaaatcctcctatcaatagcagtttattatccactatgatcaattctggattatccctcggataaataggatcatctatcagagtccatgtattgctggattcacaataaaattccgcatttctaccaaccaagaataaccttctaccgaacactaacgcgcatgatttataatgaggataataagtggatggtccaaactgccactgatcatgattgggtagcaaatattctgtagttgtatcagtttcagaatgtcctcccattacgtatataacattgtttatggatgccactgctggattacatctaggtttcagaagactcggcatattaacccaagcagcatccccgtggaaccaacgctcaacagatgtgggatttggtagacctcctactacgtataatttattgttagcgggtatcccgctagcatacagtctggggctattcatcggaggaattggaatccaattgtttgatatataatttacagctatagcattgttatgtatttcattgttcatccatccaccgatgagatatactacttctccaacatgagtacttgtacacatatggaatatatctataatttgatccatgttcataggatactctatgaatggatacttgtatgatttgcgtggttgtttatcacaatgaaatattttggtacagtctagtatccattttacattatttatacctctgggagaaagataatttgacctgattacatttttgataaggagtagcagatttcctaatttatttcttcgctttatataccacttaatgacaaaatcctcatctggaacatttagttcatcgctttctagaataagtttcatagatagataatcaaaattgtctatgatgtcatcttccagttccaaaaagtgtttggcaataaagtttttagtatgacataagagattggatagtccgtattctatacccatcatgtaacactcgacacaatattcctttctaaaatctcgtaggataaagtttatacaagtgtagatgataaattctacagaggttaatatagaagcacgtaataaattgacgacgttatgactatctatatatacctttccagtatatgagtaaataactatagaagttagactgtgaatgtcaaggtctagacaaaccctcgtaactggatctttatttttcgtgtatttttgacgtaaatgtgtgcgaaagtaaggagataactttttcaatatcgtagaattgactattatattgcctcctatggcatcaataattgttttgaatttcttagtcatagacaatgctaatatattcttacagtacacagtattgacaaatatcggcatttatgtttctttaaaagtcaacatctaaagaaaaatgattatcttcttgagacataactcccattttttggtattcacccacacgtttttcgaaaaaattagttttaccttctaatgatatattttccatgaaatcaaacggattggtaacattataaatttttttaaatcccaattcagaaatcaatctatccgcgacgaattctatatatgttttcatcatttcacaattcattcctataagtttaactggaagagccgcagtaagaaattcttgttcaatggataccgcatctgttataatagatctaacggtttcttcactcggtggatgcaataaatgtttaaacatcaaacatgcgaagtcgcagtgtagaccctcgtctctactaatcaattcgttggaaaacgtgagtccgggcattaggccacgctttttaagccaaaatatggaagcgaatgatccggaaaagaagattccttctactgcagcaaaggcaataagtctctctccataaccggcgctgtcatgtatccacttttgagcccaatcggccttcttttttacacaaggcatcgtttctatggcattaaagagatagtttttttcattactatctttaacataagtatcgatcaaaagactatacatttccgaatgaatgttttcaatggccatctgaaatccgtagaaacatctagcctcggtaatctgtacttctgtacaaaatcgttccgccaaattttcattcactattccgtcactggctgcaaaaaacgccaatacatgttttataaaatatttttcgtctggtgttagtttattccaatcattgatatctttagatatatctacttcttccactgtccaaaatgatgcctctgcctttttatacatgttccagatgtcatgatattggattgggaaaataacaaatctatttggatttggtgcaaggatgggttccataactaaattaacaataacaataaattttttttcagttatctatatgcctgtacttggatcttttgtacatcgatatcgccgcaatcactacaataattacaagtattattgatagcattgttattagtactatcataattaaattatcgttattatcattttgtaattgtgacatcatactagataaatcgtttgcgagattgttgtgggaagcgggcatggaggatgaattatcgttattattatttaaagcctcccattcggattcacaaatatggcgcgcgttcaacattttatggaaacagataacaagaaaactcgtcatcgttcaaatttttaacgatagtaaaccgattaaacgtcgagctaatttctaacgctagcgactctgttggatatgggtttccagatatatatcttttcagttcccctacgtatctataatcatctgtaggaaatggaagatatttccatttatctactgttcctaatatcatatgtggtggtgtagtagaaccattaagcgcgaaagatgttatttcgcatcgtattttaacttcgcaataatttctggttagataacgcactctaccagtcaagtcaatgatattagcctttacagatatattcatagtagtcgtaacgatgactccatcttttagatgcgatactcctttgtatgtaccagaatcttcgtacctcaaactcgatatatttaaacaagttaatgagatattaacgcgttttatgaatgatgatatataaccagaagttttatcctcggtggctagcgctataaccttatcattataataccaactagtgtgattaatatgtgacacgttagtgtgggtacaaatatgtacattatcgtctacgtcgtattcgatacatccgcatacagccaacaaatataaaatgacaaatactctaacgccgttcgtacccatcttgatgcggtttaataaatgttttgatttcaatttattgtaaaaaaagattcggttttatactgttcgatattctcattgcttatattttcatctatcatctccacacagtcaaatccgtggttagcatgcacctcatcaaccggtaaaagactatcggactcttctatcattataactctagaatatttaatttggtcattattaatcaagtcaattatcttatttttaacaaacgtgagtattttactcattttttataaaaacttttagaaatatacagactctatcgtgtgtctatatcttctttttatatccaatgtatttatgtctgatttttcttcatttatcatatataatggtccaaattctacacgtgcttcggattcatccagatcattaaggttcttataattgtaacatccttctcttccctcttctacatcttccttcttattcttattcttagcgtcacagaatctaccacagcaggatcccatgacgagcgtcatattaaactaatccattttcaattataatatacgattagtaatgaccattaaaataaaaatattcttcataaccggcaagaaagtgaaaagttcacattgaaactatgtcagtagtatacatcatgaaatgatgatatatatatactctattttggtggaggattatatgatataattcgtggataatcattcttaagacacatttcttcattcgtaaatcttttcacgttaaatgagtgtccatattttgcaatttcttcatatgatggcggtgtacgtggacgaggctgctcctgttcttgttgtagtcgccgactgtcgtgtctgcgtttagatccctccattatcgcgattgcgtagatggagtactattttataccttgtaattaaatttttttattaattaaacgtataaaaacgttccgtatctgtatttaagagccagatttcgtctaatagaacaaatagctacagtaaaaataactagaataattgctacacccactagaaaccacggatcgtaatacggcaatcggttttcgataataggtggaacgtatattttatttaaggacttaacaattgtctgtaaaccacaatttgcttccgcggatcctgtattaactatctgtaaaagcatatgttgaccgggcggagccgaacattctccgatatccaatttctgtatatctataatattattaacctccgcatacgcattacagttcttttctagcttggataccgcactaggtacatcgtctagatctattcctatttcctcagcgatagctcttctatccttttccggaagcaatgaaatcacttcaataaatgattcaaccatgagtgtgaaactaagtcgagaattactcatgcatttgttagttattcggagcgcgcaatttttaaactgtcctataacctctcctatatgaatagcacaagtgacattagtagggatagaatgttgagctaatttttgtaaataactatctataaaaagattatacaaagttttaaactctttagtttccgccatttatccagtctgagaaaatgtctctcataataaatttttccaagaaactaattgggtgaagaatggaaacctttaatctatatttatcacagtctgttttggtacacatgatgaattcttccaatgccgtactaaattcgatatctttttcgatttctggatatgtttttaataaagtatgaacaaagaaatggaaatcgtaataccagttatgtttaactttgaaattgttttttattttcttgttaatgattccagccacttgggaaaagtcaaagtcgtttaatgccgatttaatacgttcattaaaaacaaactttttatcctttagatgaattattattggttcattggaatcaaaaagtaagatattatcgggtttaagatctgcgtgtaaaaagttgtcgcagcatggtagttcgtaaattttaatgtataacagagccatctgtaaaaagataaactttatgtattgtaccaaagatttaaatcctaatttgatagctagctcggtatctactttatctgccgaatacagtgctaggggaaaaattataatatttcctctttcgtattcgtagttagttctcttttcatgttcgaaaaagtgaaacatgcggttaaaatagtttataacattaatattactgttaataactgccggataaaagtgggatagtaatttcacgaatttgatactgtcctttctctcgttaaacgcctttaaaaaaactttagaagaatatctcaatgatagttcctgaccatccatagtttgtatcaataatagcaacatatgaagaacacgtttatacagagtatgtaaaaatgttaatttatagtttaatcccatggcccacgcacacacgattaattttttttcatctccctttagattgttgtatagaaatttgggtactgtgaactccgccgtagtttccatgggactatataattttgtggcctcgaatacaaattttactacatagttatctatcttaaagactataccatatcctcctgtagatatgtgataaaaatcgtcgtttataggataaaatcgtttatccttttgttggaaaaaggatgaattaatgtaatcattctcttctatctttagtagtgtttccttattaaaattcttaaaataatttaacaatctaactgatggagcccaattttggtgtaaatctaattgggacattatattgttaaaatacaaacagtctcctaatataacagtatctgataatctatggggagacatccattgatattcaggggatgaatcattggcaacacccatttattgtacaaaaagccccaatttacaaacgaaagtccaggtttgatagagacaaactattaactattttgtctctgtttttaatttctttggtaatgaaattattcacaatatcagtatcttctttatctaccagagattttactaacttgataaccttggctgtctcattcaatagggtagtaatatttgtatgtgtgatattgatatcttttagaagtgattctttgatggtgccagcatacgaattacaataatgcagaaactcggttaacatgcaggaattatagtaagccaattccaattgttgcctgtgttgtattagagtgtcaatatgagcaatggtgtccttgcgtttctctgatagaatgcgagcagcgattttggcgttatcatttgacgatatttctggaatgacgaatcctgtttctactaactttttggtaggacaaagtgaaacaatcaagaagatagcttctcctcctatttgtggaagaaattgaactcctctagatgatctccttgacagatattggaccgaattacagaagtacctggaatgtaaagccctgaaaccccctcattttttaagcagattgttgccgtaaatcctgcactatgcccaagatagagagctcctttggtgaatccatctctatgtttcagtttaaccaagaaacagtcagctggtctaaaatttccatctctatctaatacagcatctaacttgatgtcaggaactatgaccggttatgttatatgtaacattgagtaaatccttaagttcataatcatcactgtcatcagttatgtacgatccaaacaatgtttctactggcatagtggatacgaagatgctatccatcagaatgtttccctgattagtattttctatatagctattcttctttaaacgattttccaaatcagtaactatgttcatttttttaggagtaggacgcctagccagtatggaagaggattttctagatcctctcttcaacatctttgatctcaatggaatgcaaaaccccatagtgtaacaaccaacgataaaaataatattgtttttcactttttataattttaccatctgactcatggattcattaatatctttataagagctactaacgtataattctttataactgaactgagatatatacaccggatctatggtttccataattgagtaaatgaatgctcggcaataactaatggcaaatgtataaaacaacgaaattatactagagttgttaaagttaatattttctatgagctgttccaataaattatttgttgtaactgcgttcaagtcataaatcatcttgatactatccagtaaaccgtttttaagttctggaatattattatcccattgtaaagcccctaattcgactatcgaatatcctgctctgatagcagtttcaatatcgacggacgtcaatactgtaataaaggtggtagtattgtcatcatcgtgataaactactggaatatggtcgttagtaggtacggtaactttacacaacgcgatatataactttccttttgtaccatttttaacgtagttgggacgtcctgcagggtattgttttgaagaaatgatatcgagaacagatttgatacgatatttgttggattcctgattatttactataatataatctagacagatagatgattcgataaatagagaaggtatatcgttggtaggataatacatccccattccagtattctcggatactctattaatgacactagttaagaacatgtcttctattctagaaaacgaaaacatcctacatggactcattaaaacttctaacgctcctgattgtgtctcgaatgcctcgtacaaggatttcaaggatgccatagattctttgaccaacgatttagaattgcgtttagcatctgatttttttattaaatcgaatggtcggctctctggtttgctaccccaatgataacaatagtcttgtaaagataaaccgcaagaaaatttatacgcatccatccaaataaccctagcaccatcggatgatattaatgtattattatagattttccatccacagttattgggccagtatactgttagcaacggtatatcgaatagattactcatgtaacctactagaatgatagttcgtgtactagtcataatatctttaatccaatctaagaaatttaaaattagattttttacactgttaaagttaacaaaggtattacccggatacgtggatatcatatatggtattggtccattatcagtaatagctccataaactgatacggcgatggtttttatatgtgtttgatctaacgaggaagaaattcgcgcccacaattcatctctagatatgtatttaatatcaaacggtaacacatcaatttcgggacgcgtatatgtttctaaatttttaatccaaatataatgatgacctatatgccctattatcatactgtcaactatagtacacctagagaacttacgatacatctgtttcctataatcgttaaattttacaaatctataacatgctaaaccttttgacgacaaccattcattaatttctgatatggaatctgtattctcaataccgtatcgttctaaagccagtgctatatctccctgttcgtgagaacgctttcgtataatatcgatcaacggataatctgaagtttttggagaataatatgactcatgatctatttcgtccataaacaatctagacataggaattggaggcgatgatcttaattttgtgcaatgagtcgtcaatcctataacttctaatattgtaatattcatcatcgacataacactatctatgttatcatcgtatattagtataccatgaccttcttcatttcgtgccaaaatgatatacagtcttaaatagttacgcaatatctcaatagtttcataattgttagctgttttcatcaaggtttgtatcctgtttaacatgatggcgttctatacgtttctattttttaaatttttaacgatttactgtggctagatacccaatctctctcaaatatttttttagcctcgcttacaagctgtttatctatactattaaaactgacgaatccgtgattttggtaatgggttccgtcgaaatttgccgaagtgatatgaacatattcgtcgtcgactatcaacaattttgtattattctgaatagtgaaaaccttcacagatagatcattttgaacacacaacgcgtctagacttctggcggttgccatagaatatacgtcgttcttatcccaattaccaactagaagtctgatcttaactcctctattaatggctgcttctataatggagttgtaaatgtcgggccaatagtagctattaccgtcgacacgtgtagtgggaactatggccaaatgttcaatatctatactagtcttagccgacttgagtttatcaataactacatcagtgtctagatctctagaatatcccaataggtgttccggagaatcagtaaagaacactccacctataggattcttaatatgatacgcagtgctaactggcagacaacaagccgcagagcataaattcaaccatgaattttttgcgctattaaaggctttaaaagtatcaaatcttctacgaagatctgtggccagcgggggataatcagaatatacacctaacgttttaatcgtatgtatagatcctccagtaaatgacgcgtttcctacataacatctttcattatctgacacccaaaaacaaccgagtagtagtcccacattattttttttatctatattaacggttataaaatttatatccgggcagtgactttgtagctctcccagatttcttttccctcgttcatctagcaaaactattattttaatccctttttcagatgcctcttttagtttatcaaaaataagcgctcccctagtcgtactcagaggattacaacaaaaagatgctatgtatatatatttcttagctagagtgataatttcgttaaaacattcaaatgttgttaaatgatcggatctaaaatccatattttctggtagtgtttctaccagcctacattttgctcccgcaggtaccggtgcaaatggccacatttagttaacataaaaacttatacatcctgttctatcaacgattctagaatatcatcggctatatcgctaaaattttcatcaaagtcgacatcacaacctaactcagtcaatatattaagaagttccatgatgtcatcttcgtctatttctatatccgtatccattgtagattgttgaccgattatcgagtttaaatcattactaatactcaatccttcagaatacaatctgtgtttcattgtaaatttataggcggtgtatttaagttggtagattttcaattatgtatcaatatagcaacagtagttcttgctcctccttgattctagcatcctcttcattattttcttctacgtacataaacatgtccaatacgttagacaacacaccgacgatggcggccgccacagacacgaatatgactaaaccgatgaccatttaaaaacccctctctagctttcacttaaactgtatcgattattcttttagaacatgtataatataaaaacattattctatttcgaatttaggcttccaaaaatttttcatccgtaaaccgataataatatatatagacttgttaatagtcggaataaatagattaatgcttaaactatcatcatctccacgattagagatacaatatttacattttttttgctgtttcgaaactttatcaatacacgttaatacaaacccaggaaggagatattgaaactgaggctgttgaaaatgaaacggtgaatacaataattcagataatgtaaaatcatgattccgtattctgatgatattagaactgctaatggatgtcgatggtatgtatctaggagtatctattttaacaaagcatcgatttgctaatatacaattatcattttgattaattgttattttattcatattcttaaaaggtttcatatttatcaattcttctacattaaaaatttccatttttaatttatgtagccccgcaatactcctcattacgtttcattttttgtctataatatccattttgttcatctcggtacatagattatccaattgagaagcgcatttagtagttttgtacattttaagtttattgacgaatcgtcgaaaactagttatagttaacattttattatttgataccctgatattaatacccctgccgttactattatttataactgatgtaatccacgtaacattggaattaactatcgatagtaatgcatcgacgcttccaaaattgtctattataaactcaccgataatttttttattacatgttttcatattcattaggattattaaatctttaatcttactacgattgtatgcgttgatattgcaagacgtcattctaaaagacggaggatctccatcaaatgccagacaatcacgtacaaagtacatggaaataggttttgttctattgcgcatcatagatttatatagaacacccgtagaaatactaatttgttttactctataaaatactaatgcatctatttcatcgttttgtataacgtctttccaagtgtcaaattccaaatttttttcattgatagtaccaaattcttctatctctttaactacttgcatagataggtaattacagtgatgcctacatgccgttttttgaaactgaatagatgcgtctagaagcgatgctacgctagtcacaatcaccactttcatatttagaatatatatatgtaaaaatatagtagaatttcattttgttttttttctatgctataaatgaattctcattttgcatctgctcatactccgttttatatcaataccaaagaaggaagatatctggttctaaaagccgttaaagtatgcgatgttagaactgtagaatgcgaaggaagtaaagcttcctgcgtactcaaagtagataaaccctcatcacccgcgtgtgagagaagaccttcgtccccttccagatgcgagagaatgaataacccaggaaaacaagttccgtttatgaggacggacatgctacaaaatatgttcgcggctaatcgcgataatgtagcttctagacttttgtcctaaaatacaattatatccttttcgatattaataaatccgtgtcgtccaggttttttatctctttcagtatgtgaatagataggtattttatctctattcatcatcgaatttaagagatccgataaacattgtttgtattctccagatgtcagcatctgatacaacaatatatgtgcacataaacctctggcacttatttcatgtaccttccccttatcactaaggagaatagtatttgagaaatatgtatacatgatattatcatgaattagatatacagaatttgtaacactctcgaaatcacacgatgtgtcggcgttaagatctaatatatcactcgataacacattttcatctagatacactagacattttttaaagctaaaatagtctttagtagtaacagtaactatgcgattattttcatcgatgatacatttcatcggcatattattacgcttaccatcaaagactataccatgtgtatatctaacgtattctagcatggttgccatacgcgcattaaacttttcaggatctttggatagatcttccaatctatctatttgagaaaacatttttatcatgttcaatagttgaaacgtcggatccactatatagatattatctataaagattttaggaactacgttcatggtatcctggcgaatattaaaactatcaatgatatgattatcgttttcatcttttatcaccatatagtttctaagatatgggattttacttaatataatattatttcccgtaataaattttattagaaatgccaaatctataagaaaagtcctcgaattagtttgaagaatatctatatcgccgtaccgtatatttggattaattagatatagagaatatgatccgtaacatatacaacttttattatggcgtctaagatattcttccatcaacttattaacatttttgactagggaagatacattatgacgtcccattacttttgccttgtctattactgcgacgttcatagaatttagcatatctcttgccaattcttccattgatgttacattataagaaattttagatgaaattacatttggagctttaatagtaagaactcctaatatgtccgtgtatgtggtcactaatacagattgtagttctataatcgtaaataatttacctatattatatgtttgagtctgtttagaaaagtagctaagtatacgatcttttatttctgatgcagatgtatcaacatcggaaaaaaatctttttttattcttttttactaaagatacaaatatgtctttgttaaaaacagttattttctgaatatttctagcttgtaattttaacatatgatattcgttcacactaggtactctgcctaaataggtttctataatctttaatgtaatattaggaaaagtattctgatcaggattcctattcattttgaggatttaaaactctgattattgtctaatatggtctcaacacaaactttttcacagagcgatagagtttttgataactcgtttttcttaagaaatataaaactactgtctccagagctcgctctatcttttattttatttaattcgatacaaactcctgatactggttcagaaagtaattcattaattttcagtcctttatagaagatatttaatatagataatacaaaatcttcagtttttgatatcgatctgattgatcctagaactagatatattaataacgtgctcattaggcagtttatggcagcttgataattagatatagtatattccagttcatatttattagataccgcattgcccagattttgatattctatgaattcctctgaaaataaatccaaaataactagacattctattttttgtggattagtgtactctcttccctctatcatgttcactactggtgtccacgatgataaatatctagagggaatataatatagtccataggatgccaatctagcaatgtcgaataactgtaattttattcttcgctcttcattatgaattgattcttgaggtataaacctaacacaaattatattattagacttttcgtatgtaatgtctttcatgttataagtttttaatcctggaatagaatctattttaatgaggcttttaaacgcagagttctccaacgagtcaaagcataatactctgttggttttcttatatacgatgttacgattttcttctttgaatggaataggtttttgaattagtttataattacaacataatagataaggaagtgtgcaaatagtacgcggaaaaaacataatagctcccctgttttcatccatggttttaagtaaatgatcactggcttctttagtcaatggatattcgaacattaaccgtttcatcatcattggacagaatccatatttcttaatgtaaagagtgatcaaatcattgtgtttattgtaccatcttgttgtaaatgtgtattcggttatcggatctgctcctttttctattaaagtatcgatgtcgatctcgtctaagaattcaactatatcgacatatttcatttgtatacacataaccattactaacgtagaatgtataggaagagatgtaacgggaacagggtttgttgattcgcaaactattctaatacataattcttctgttaatacgtcttgcacgtaatctattatagatgccaagatatctatataattattttgtaagatgatgttaactatgtgatctatataagtagtgtaataattcatgtatttcgatatatgttccaactctgtctttgtgatgtctagtttcgtaatatctatagcatcctcaaaaaatatattcgcatatattcccaagtcttcagttctatcttctaaaaaatcttcaacgtatggaatataataatctattttacctcttctgatatcattaatgatatagtttttgacactatcttctgtcaattgattcttattcactatatctaagaaacggatagcgtccctaggacgaactactgccattaatatctctattatagcttctggacataattcatctattataccagaattaatgggaactattccgtatctatctaacatagttttaagaaagtcagaatctaagacctgatgttcatatattggttcatacatgaaatgatctctattgatgatagtgactatttcattctctgaaaattggtaactcattctatatatgctttccttgttgatgaaggatagaatatactcaatagaatttgtaccaacaaactgttctcttatgaatcgtatatcatcatctgaaataatcatgtaaggcatacatttaacaattagagacttgtctcctgttatcaatatactattcttgtgataatttatgtgtgaggcaaatttgtccacgttctttaattttgttatagtagatatcaaatccaatggagctacagttcttggcttaaacagatatagtttttctggaacgaattctacaacattattataaaggactttgggtagataagtgggatgaaatcctattttaattaatgcgatagccttgtcctcgtgcagatatccaaacgcttttgtgatagtatggcattcattgtctagaaacgctctacgaatatctgtgacagatatcatctttagagaatatactagtcgcgttaatagtactacaatttgtattttttaatctatctcaataaaaaaattaatatgtatgattcaatgtataactaaactactaactgttattgataactagaatcagaatctaatgatgacgtaaccaagaagtttatctactgccaatttagctgcattatttttagcatctcgtttagattttccatctgccttatcgaatactcttccgtcgatatctacacaggcataaaatgtaggagagttactaggccccactgattcaatacgaaaagaccaatctctcttagttatttggcagtactcattaataatggtgacagggttagcatctttccaatcaataatttttttagccggaataacatcatcaaaagacttatgatcctctctcattgatttttcgcgggatacatcatctattatggcgtcagccataacatcagcatccggcttatccgcctccgttgtcataaaccaacgaggaggaatatcgtcggagctgtacaccatagcactacgttgaagatcgtacagagctttattaacttctcgcttctccatattaagttgtctagttagttgtgcagcagtagctccttcgattccaatgtttttaatagccgcacacacaatctctgcgtcagaacgctcgtcaatatagatcttagacatttttagagagaactaacacaaccagcaataaaactaatttattttatcatttttttattcatcatcctctggtggttcgtcgtttctatcgaatgtggatctgattaacccgtcatctataggtgatgctggttctggagattctggaggagatggattattatctggaagaatctctgttatttccttgttttcatgtatcgattgcgttgtaacattaagattgcgaaatgctctaaatttgggaggcttaaagtgttgtttgcaatctctacacgcatgtctaactagtggaggttcgtcagcggctctagtttgaatcatcatcggcgtagtattcctacttttacagttaggacacggtgtattgtatttctcgtcgagaacgttaaaataatcgttgtaactcacatcctttattttatctatattgtattctactcctttcttaatgcattttataccgaataagagatagcgaaggaattctttttcggtgccgctagtacccttaatcatatcacatagtgttttatattccaaatttgtggcaatagacggtttatttctatacgatagtttgtttctggaatcctttgagtattctataccaatattattctttgattcgaatttagtttcttcgatattagattttgtattacctatattcttgatgtagtactttgatgatttttccatggcccattctattaagtcttccaagttggcatcatccacatattgtgatagtaattctcggatatcagtagcggctaccgccattgatgtttgttcattggatgagtaactactaatgtatacattttccatttataacacttatgtattaactttgttcatttatattttttcattattatgttgatattaacaaaagtgaatatatatgttaataattgtattgtggttatacggctacaatttcataatgagtggaagtcagtgtccgatgatcaatgacgatagctttactctgaaaagaaagtatcaaatcgatagtgcggagtcaacaataaaaatggataagaagaggataaagtttcagaatagagccaaaatggtaaaagaaataaatcagacaataagagcagcacaaactcattacgagacattgaaactaggatacataaaatttaagagaatgattaggactactactctagaagatatagcaccatctattccaaataatcagaaaacttataaactattctcggacatttcagccatcggcaaagcatcacagaatccgagtaagatggtatatgctctgctgctttacatgtttcccaatttgtttggagatgatcatagattcattcgttatagaatgcatccaatgagtaaaatcaaacacaagatcttctctcctttcaaacttaatcttattagaatattagtggaagaaagattctataataatgaatgcagatctaataaatggagaataattggaacacaagttgataaaatgttgatagctgaatctgataaatatacaatagatgcaaggtataacctaaaacccatgtatagaatcaagggaaaatctgaagaagataccctctttatcaaacagatggtagaacaatgtgtgacatcccaggaattggtggaaaaagtgttgaagatactgtttagagatttgttcaagagtggagaatacaaagcgtacagatacgatgatgatgtagaaaatggatttattggattggatacactaaaattaaacattgttcatgatatagttgaaccatgtatgcctgttcgtaggccagtggctaagatactgtgtaaagaaatggtaaataaatactttgagaatccgctacatattattggtaaaaatcttcaagagtgcattgactttgttagtgaataggcatttcatctttctccaatactaattcaaattgttaaattaataatggatagtataaatagttattagtgataaaatagtaaaaataattattagaataagagtgtagtatcatagataactctcttctataaaaatggattttattcgtagaaagtatcttatatacacagtagaaaataatatagattttttaaaggatgatacattaagtaaagtaaacaattttaccctcaatcatgtactagctctcaagtatctagttagcaattttcctcaacacgttattactaaggatgtattagctaataccaatttttttgttttcatacatatggtacgatgttgtaaagtgtacgaagcggttttacgacacgcatttgatgcacccacgttgtacgttaaagcattgactaagaattatttatcgtttagtaacgcaatacaatcgtacaaggaaaccgtgcataaactaacacaagatgaaaaatttttagaggttgccgaatacatggacgaattaggagaacttataggcgtaaattatgacttagttcttaatccattatttcacggaggggaacccatcaaagatatggaaatcatttttttaaaactgtttaagaaaacagacttcaaagttgttaaaaaattaagtgttataagattacttatttgggcttacctaagcaagaaagatacaggcatagagtttgcggataatgatagacaagatatatacactctatttcaacaaactggtagaatagtccatagcaatctaacagaaacgtttagagattatatctttcccggagataagactagctattgggtgtggttaaacgaaagtatagctaatgatgcggatattgttcttaatagacacgccattaccatgtatgataaaattcttagttatatatactctgagataaaacaaggacgcgttaataaaaacatgcttaagttagtttatatctttgagcctgaaaaagatatcagagaacttctgctagaaatcatatatgatattcctggagatatcctatctattattgatgcaaaaaacgacgattggaaaaaatattttattagtttttataaagctaattttattaacggtaatacatttattagtgatagaacgtttaacgaggacttattcagagttgttgttcaaatagatcccgaatatttcgataatgaacgaattatgtctttattctctacgagtgctgcggacattaaacgatttgatgagttagatattaataacagttatatatctaatataatttatgaggtgaacgatatcacattagatacaatggatgatatgaagaagtgtcaaatctttaacgaggatacgtcgtattatgttaaggaatacaatacatacctgtttttgcacgagtcggatcccatggtcatagagaacggaatactaaagaaactgtcatctataaaatccaagagtagacggctgaacttgtttagcaaaaacattttaaaatattatttagacggacaattggctcgtctaggtcttgtgttagatgattataaaggagacttgttagttaaaatgataaaccatcttaagtctgtggaggatgtatccgcattcgttcgattttctacagataaaaaccctagtattcttccatcgctaatcaaaactattttagctagttataatatttccatcatcgtcttatttcaaaggtttttgagagataatctatatcatgtagaagaattcttggataaaagcatccatctaaccaagacggataagaaatatatacttcaattgataagacacggtagatcatagaacagaccaaatatattattaataatttgtatatacatagatataattatcacacatttttgataaatgggaactgctgcaacaattcagactcccaccaaattaatgaataaagaaaatgcagaaatgattttggaaaaaattgttgatcatatagttatgtatattagtgacgaatcaagtgattcagaaaataatcctgaatatattgattttcgtaacagatacgaagactatagatctctcattataaaaagtgatcacgagtttgtaaagctatgtaaaaatcatgcagagaaaagttctccagaaacgcaacaaatgattatcaaacacatatacgaacaatatcttattccagtatctgaagtactattaaaacctataatgtccatgggtgacataattacatataacggatgtaaagacaatgaatggatgctagaacaactctctaccctaaactttaacaatctccgcacatggaactcatgtagcataggcaatgtaacgcgtctgttttatacattttttagttatctgatgaaagataaactaaatatataagtataatcccattctaatactttaacctgatgtattacctgcatcttattagaatattaacctaactaaaagacataacatagttgataaaaagcggtaggatataaatattatggctgccaccgttccgcgttttgacgacgtgtacaaaaatgcacaaagaagaattctagatcaagaaacattttttagtagaggtctaagtagaccgttaatgaaaaacacatatctatttgataattacgcgtatggatggataccagaaactgcaatttggagtagtagatacgcaaacttagatgcaagtgactattatcccatttcgttgggattacttaaaaagttcgagtttctcatgtctctatataaaggtcctattcccgtatatgaagaaaaagtaaatactgaattcattgctaatggatcgttctctggtagatacgtatcatatcttcgaaagttttctgcccttccaacaaacgagtttattagttttttgttactgacttccattccaatctataatatcttgttctggtttaaaaatactcagtttgatattactaaacacacattattcagatacgtctatacagataatgccaaacacctggcgttggctaggtatatgcatcaaacaggagactataagcctttgtttagtcgtctcaaagagaattatatatttaccggtcccgttccaataagtatcaaagatatagatcaccctaatcttagtagagcaagaagtccatccgattatgagacattagctaatattagtactatattgtactttaccaagtatgatccggtattaatgtttttattgttttacgtacctgggtattcaattactacaaaaattactccagccgtagaatatctaatggataaactgaatctaacaaagagcgacgtacaactgttgtaaattattttatgcttcgtaaaatgtaggttttgaaccaaacattctttcaaagaatgagatgcataaaactttattatccaatagattgactatttcggacgtcaatcgtttaaagtaaacttcgtaaaatattctttgatcactgccgagtttaaaacttctatcgataattgtttcatatgttttaatatttacaagttttttggtccatggtacattagccggacaaatatatgcaaaataatatcgttctccaagttctatagtttctggattatttttattatattcagtaaccaaatacatattagggttatctgcggatttataatttgagtgatgcattcgactcaacataaataattctagaggagacgatctactatcaaattcggatcgtaaatctgtttctaaagaacggagaatatctatacatacctgattagaattcatccgtccttcagacaacatctcagacagtctggtcttgtatgtcttaatcatattcttatgaaacttggaaacatctcttctagtttcactagtacctttattaattctctcaggtacagattttgaattcgacgatgctgagtatttcatcgttgtatatttcttcttcgattgcataatcagattcttatataccgcctcaaactctattttaaaattattaaacaatactctattattaatcagtcgttctaactctttcgctatttctatagacttatcgacatcttgactgtctatctctgtaaacacggagtcggtatctccatacacgctacgaaaacgaaatctgtaatctataggcaacgatgttttcacaatcggattaatatctctatcgtccatataaaatggattacttaatggattggcaaaccgtaacataccgttagataactctgctccatttagtaccgattctagatacaagatcattctacgtcctatggatgtgcaactcttagccgaagcgtatgagtatagagcactatttctaaatcccatcagaccatatactgagttggctactatcttgtacgtatattgcatggaatcatagatggccttttcagttgaactggtagcctgttttagcatctttttatatctggctctctctgccaaaaatgttcttaatagtctaggaatggttccttctatcgatctatcgaaaattgctatttcagagatgaggttcggtagtctaggttcacaatgaaccgtaatatatctaggaggtggatatttctgaagcaagagctgattatttatttcttcttccaatctattggtactaacaacgacaccgactaatgtttccggagatagatttccaaagatacacacattaggatacagactgttataatcaaagattaatacattattactaaacattttttgttttggagcaaataccttaccgccttcataaggaaacttttgttttgtttctgatctaactaagatagttttagtttccaacaatagctttaacagtggacccttgatgactgtactcgctctatattcgaataccatggattgaggaagcacatatgttgacgcacccgcgtctgtttttgtttctactccataatactcccacaaatactgacacaaacaagcatcatgaatacagtatctagccatatctaaagctatgtttagattataatccttatacatctgagctaaatcaacgtcatcctttccgaaagataatttatatgtatcattaggtaaagtaggacatgatagtacgactttaaatccattttcccaaatatctttacgaattactttacatataatatcctcatcaacagtcacataattacctgtggttaaaacctttgcaaatgcagcggctttgcctttcgcgtccgtagtatcgtcaccgatgaacgtcatttctctaactcctctatttaatactttacccatgcaactgaacgcgttcttggatatagaatccaatttgtacgaatccaatttttcagatttttgaatgaatgaatatagatcgaaaaatatagttccattattgttattaacgtgaaacgtagtattggccatgccgcctactcccttatgactagactgatttctctcataaatacagagatgtacagcttcctttttgtccggagatctaaagataatcttctctcctgttaataactctagacgattagtaatatatctcagatcaaagttatgtccgttaaaggtaacgacgtagtcgaacgttagttccaacaattgtttagctattcgtaacaaaactatttcagaacatagaactagttctcgttcgtaatccatttccattagtgactgtatcctcaaacatcctctatcgacggcttcttgtatttcctgttccgttaacatctcttcattaatgagcgtaaacaataatcgtttaccacttaaatcgatataacagtaacttgtatgcgagattgggttaataaatacagaaggaaacttcttatcgaagtgacactctatatctagaaataagtacgatcttgggatatcgaatctaggtatttttttagcgaaacagttacgtggatcgtcacaatgataacatccattgttaatctttgtcaaatattgctcgtccaacgagtaacatccgtctggagatatcccgttagaaatataaaaccaactaatattgagaaattcatccatggtggcattttgtatgctgcgtttctttggctcttctatcaaccacatatctgcgacggagcattttctatctttaatatctagattataacttattgtctcgtcaatgtctatagttctcatctttcccaacggcctcgcattaaatggaggaggagacaatgactgatatatttcgtccgtaactacgtaataaaagtaatgaggaaatcgtataaatacggtctcgccatttcgacatctggatttcagatataaaaatctgttttcaccgtgactttcaaaccaattaatgcaccgaacatccatttatagaatttagaaatatattttcatttaaatgaatcccaaacattggggaagagccgtatggaccattatttttatagtactttcgcaagcgggtttagacggcaacatagaagcgtgtaaacgaaaactatatactatagtcagcactcttccatgtcctgcatgtagacggcacgcgactatcgctatagaggacaataatgtcatgtctagcgatgatctgaattatatttattattttttcatcagattatttaacaatttggcatctgatcccaaatacgcgatcgatgtgacaaaggttaaccctttataaacttaacccattataaaacttatgattagtcacgactgaaataaccgcgtgattattttttggtataattctacacggcatggtttctgtaactatgaattcaacccccgttacattagtgaaatctttaacaaacagcaagggttcgtcaaagacataaaactcattgtttacaatcgaaatagaccccctatcacacttaaaataaaaaatatccttatcctttaccaccaaataaaattctgattggtcaatgtgaatgtattcacttaacagttccacaaatttatttattaactccgaggcacatacatcgtcggtattttttatggcaaactttactcttccagcatccgtttctaaaaaaatattaacgagttccatttatatcatccaatattattgaaatgacgttgatggacagatgatacaaataagaaggtacggtacctttgtccaccatctcctccaattcatgctctattttgtcattaactttaatgtatgaaaacagtacgccacatgcttccatgacagtgtgtaacactttggatacaaaatgtttgacattagtataattgtccaagactgtcaatctataatagatagtagctataatatattctatgatggtattgaagaagatgacaatcttggcatattgatcatttaacacagacatggtatcaacagatagcttgaatgaaagagaatcagtaattggaataagcgtcttctcgatagagtgtccgtataccaacatgtctgatattttgatgtattccattaaattatttagttttttctttttattctcgttaaacagcatttctgtcaacggaccccaacatcgttgaccgattaagttttgattgatttttccgtgtaaggcgtatctagtcagatcgtatagcctatccaataatccatcatctgtgcgtagatcacatcgtacactttttaattctctatagaagagcgacagacagcaatttctttattctctacagatgtaagatacttgaagacattcctatgatgatgcagaattttggataacacggtattgatggtatctgttaccataattcctttgatggctgatagtgtcagagcacaagatttccaatctttgttttgatatctatatcagacagcatggtgcgtctgacaacacaaggattaagacggaaagatgaaatgattctctcaacatcttcaatggataccttgctattttttctggcattatctatatgtgcgagaatatcctctagagaatcagtatcctttttgatgatagtggatctcaatgacatgggacgtctaaaccttcttattctatcaccagattgcatggtgatttgtcttctttcttttatcataatgtaatctctaaattcatcggcaaattgtctatatctaaaatcataatatgagatgtttacctctacaaatatctgttcgtccaatgttagagtatctacatcagttttgtattccaaattaaacatggcaacggatttaattttatattcctctattaagtcctcgtcgataataacagaatgtagataatcatttaatccatcgtacatggttggaagatgcttgttgacaaaatctttaattgtcttgatgaaggtgggactatatctaacatcttgattaataaaatttataacattgtccataggatactttgtaactagttttatacacatctcttcatcggtaagtttagacagaatatcgtgaacaggtggtatattatattcatcagatatacgaagaacaatgtccaaatctatattgtttaatatattatatagatgtagcgtagctcctacaggaatatctttaactaagtcaatgatttcatcaaccgttagatctattttaaagttaatcatataggcattgatttttaaaaggtatgtagccttgactacattctcattaattaaccattccaagtcactgtgtgtaagaagattatattctatcataagcttgactacatttggtcccgataccattaaagaattcttatgatataaggaaacagattttaggtactcatctactctacaagaattttggagagccttaacgatatcagtgacgtttattatttcaggaggaaagaatctaacattgagaatatcggaattaatagcttccagatacagtgattttggcaatagtccgtgtaatccataatccagtaacacgagctggtgcttgctagacaccttttcaatgtttaatttttttgaaataagctttgataaagccttcctcgcaaattccggatacatgaacatgtcggcgacatgattaagtattgttttttcattattttctcaacaagttctcaataccccaatagatgatagaatatcacccaatgcgtccatgttgtctatttccaacaggtcgctatatccaccaatagaagtttttccaaaaaagattctaggaacagttctaccaccagtaatttgttcaaaatagtcacgcaattcattttcgggtttaaattctttaatatcgacaatttcatacgctcctcttttgaaactaaacttatttagaatatccagtgcatttctacaaaaaggacatgtatacttgacaaaaattgtcactttgttattggccaacctttgttgtacaaattcctcggccattttaatatttaagtgatataaaactatctcgacttatttaactctttagtcgagatatatggacgcagatagctatatgatagccaactacagaaggcaaacgctataaaaaacataattacgacgagcatatttataaatatttttattcagcattacttgatatagtaatattaggcacagtcaaacattcaaccactctcgatacattaactctctcattttctttaacaaattctacaatatcttcgtaaaaagattcttgaaactttttagaatatctatcgactctagatgaaatagcgttcgtcaacatactatgttttgtatacataaaggcgcccattttaacagtttctagtgacaaaatgctagcgatcctaggatcctttagaatcacatagattgacgattcgtctctcttagtaactctagtaaaataatcatacaatctagtacgcgaaataatattatccttgacttgaggagatctaaacaatctagttttgagaacatcgataagttcatcgggaatgacatacatactatctttaatagaactcttttcatccagttgaatggattcgtccttaaccaactgattaatgagatcttctattttatcattttccagatgatatgtatgtccattaaagttaaattgtgtagcgcttctttttagtctagcagccaatactttaacatcactaatatcgatatacaaaggagatgatttatctatggtattaagaattcgtttttcgacatctgtcaaaaccaattcctttttgcctgtatcatccagttttccatcctttgtaaagaaattattttctactagactattaataagactgataaggattcctccataattgcacaatccaaactttttaacaaaactagactttacaagatctacaggaatgcgtaattcaggtttcttagcttgtgattttttcttttgtggacattttcttgtgaccaactcatctaccatttcattgattttagcagtgaaataagctttcaatgcacgggcactgatactattgaaaacgagttgatcttcaaattccgccatttaagttcaccaaacaacttttaaatacaaatatatcaatagtagtagaataagaactataaaaaaaataataattaaccaataccaaccccaacaaccggtattattagttgatgtgactgttttctcatcacttagaacagatttaacaatttctataaagtctgtcaaatcatcttccggagaccccataaatacaccaaatatagcggcgtacaacttatccatttatacattgaatattggcttttctttatcgctatcttcatcatattcatcatcaatatcaacaagtcccagattacgagccagatcttcttctacattttcagtcattgatacacgttcactatctccagagagtccgataacgttagccaccacttctctatcaatgattagtttcttgagtgcgaatgtaatttttgtttccgttccggatctatagaagacgataggtgtgataattgccttggccaattgtctttctcttttactgagtgattctagttcaccttctatagatctgagaatggatgattctccagtcgaaacatattctaccatggatccgtttaatttgttgatgaagatggattcatccttaaatgttttctctgtaatagtttccaccgaaagactatgcaaagaatttggaatgcgttccttgtgcttaatgtttccatagacggcttctagaagttgatacaacataggactagccgcggtaacttttatttttagaaagtatccatcgcttctatcttgtttagatttatttttataaagtttagtctctccttccaacataataaaagtggaagtcatttgactagataaactatcagtaagttttatagagatagacgaacaattagcgtattgagaagcatttagtgtaacgtattcgatacattttgcattagatttactaatcgattttgcatactctataacacccgcacaagtctgtagagaatcgctagatgcagtaggtcttggtgaagtttcaactctcttcttgattaccttactcatgattaaacctaaataattgtactttgtaatataatgatatatattttcactttatctcatttgagaataaaaatgtttttgtttaaccactgcatgatgtacagatttcggaatcgcaaaccaccagtggttttattttatccttgtccaatgtgaattgaatgggagcggatgcgggtttcgtacgtagatagtacattcccgtttttagaccgagactccatccgtaaaaatgcatactcgttagtttggaataactcggatctgctatatggatattcatagattgactttgatcgatgaaggctcccctgtctgcagccatttttatgatcgtcttttgtggaatttcccaaatagttttataaactcgcttaatatcttctggaaggtttgtattctgaatggatccaccatctgccataatcctattcttgatctcatcattccataattttctctcggttaaaactctaaggagatgcggattaactacttgaaattctccagacaatactctccgagtgtaaatattactggtatacggttccaccgactcattatttcccaaaatttgagcagttgatgcagtcggcataggtgccaccaataaactatttctaagaccgtatgttctgattttatcttttagaggttcccaattccaaagatccgacggtacaacattccaaagatcatattgtagaataccgttactggcgtacgatcctacatatgtatcgtatggtccttccttctcagctagttcacaactcgcctctaatgcaccgtaataaatggtttcgaagatcttcttatttagatcttgtgcttccaggctatcaaatggataatttaagagaataaacgcgtccgctaatccttgaacaccaataccgataggtctatgtctcttattagagatttcagcttctggaataggataataattaatatctataattttattgagatttctgacaattactttgaccacatccttcagtttgagaaaatcaaatcgcccatctattacaaacatgttcaaggcaacagatgccagattacaaacggctacctcattagcatccgcatattgtattatctcagtgcaaagattactacacttgatagttcctaaattttgttgattactctttttgttacacgcatccttataaagaatgaatggagtaccagtttcaatctgagattctataatcgctttccagacgactcgagcctttattatagatttgtatctcctttctctttcgtatagtgtatacaatcgttcgaactcgtctccccaaacattgtccaatccaggacattcatccggacacatcaacgaccactctccgtcatccttcactcgtttcataaagagatcaggaatccaaagagctataaatagatctctggttctatgttcctcgtttcctgtattctttttaagatcgaggaacgccataatatcagaatgccacggttccaagtatatggccataactccaggccgtttgtttcctccctgatctatgtatctagcggtgttattataaactctcaacattggaataataccgtttgatataccattggtaccggagatatagcttccactggcacgaatattactaattgatagacctattccccctgccattttagagattaatgcgcatcgttttaacgtgtcatagataccctctatgctatcatcgatcatgttaagtagaaaacagctagacatttggtgacgactagttcccgcattaaataaggtaggagaagcgtgcgtaaaccatttttcagaaagtagattgtacgtctcaatagctgagtctatatcccattgatgaattcctactgcgacacgcattaacatgtgctgaggtctttcaacgatcttgttgtttattttcaacaagtaggatttttccaaagttttaaaaccaaaatagttgtatgaaaagtctcgttcgtaaataataaccgagttgagtttatccttatatttgttaactatatccatggtgatacttgaaataatcggagaatgtttcccatttttaggattaacatagttgaataaatcctccatcacttcactaaatagtttttttgtttccttgtgtagatttgatacggctattctggcggctagaatggcataatccggatgttgtgtagtacaagtggctgctatttcggctgccagagtgtccaattctaccgttgttactccattatatattccttgaataaccttcatagctattttaataggatctatatgatccgtgtttaagccataacataattttctaatacgagacgtgattttatcaaacatgacattttccttgtatccatttcgtttaatgacaaacatttttgttggtgtaataaaaaaaattatttaacttttcattaatagggatttgacgtatgtagcgtacaaaattatcgttcctggtatatagataaagagtcctatatatttgaaaatcgttacggctcgattaaactttaatgattgcatagtgaatatatcattaggatttaactccttgactatcatggcggcgccagaaattaccatcaaaagcattaatacagttatgccgatcgcagttagaacggttatagcatccaccatttatatctaaaaattagatcaaagaatatgtgacaaagtcctagttgtatactgagaattgacgaaacaatgtttcttacatattttttttttattagtaaccgacttaatagtaggaactggaaaactagacttgattattctataagtatagatacccttccaaataatattctctttgataaaagttccagaaaatgtagaattttttaaaaagttatcttttgctattaccaagattgtgtttagacgcttattattaatatgagtgatgaaatccacaccgcctctagatatcgcttttatttccacattagatggtaaatccaatagtgaaactatctttttaggaatgtatggactcgcgtttagaggagtgaacgtcttaggcgtcggaaaggatgattcatcaaacgaataaacaatttcacaaatggatgttaatgtattagtaggaaattttttgacgctagtggaattgaagattctaatggatgatgttctacctatttcatccgataacatgttaatttccgacaccaacggttttaatatttcgatgatatacggtagtctctctttcggacttatatagcttattccacaatacgagtcattatatactccaaaaaacaaaataactagtataaaatctgtatcgaatgggaaaaacgaaattatcgacataggtatagaatctggaacattgaacgtattaatacttaattctttttctgtggtaagtaccgataggttattgacattgtatggttttaaatattctataacttgagacttgatagatattagtgatgaattgaaaattatttttatcaccacgtgtgtttcaggatcatcgtcgacgcccgtcaaccaaccgaatggagtaaaataaatatcattaatatatgctctagatattagtatttttatcaatcctttgattatcatcttctcgtaggcgaatgattccatgatcaagagtgatttaagaacatcctccggagtattaatgggcttagtaaacagtccatcgttgcaataataaaagttatccaagttaaaggatattatgcattcgtttaaagatatcacctcatctgacggagacaattttttggtaggttttagagactttgaagctacttgtttaacaaagttattcatcgtcgtttactattctatttaattttgtagttaatttatcacatatcacattaattgactttttggtccatttttccatacgtttatattcttttaatcctgcgttatccgtttccgttatatccagggatagatcttgcaagttaaatagaatgctcttaaataatgtcattttcttatccgctaaaaatttaaagaatgtataaacctttttcagagatttgaaactcttaggtggtgtcctagtacacaatatcataaacaaactaataaacattccacattcagattccaacagctgattaacttctacattaatacagcctattttcgctccaaatgtacattcgaaaaatctgaataaaacatcgatgtcacaatttgtattatccaatacagaatgtttgtgattcgtgttaaaaccatcggagaaggaataaaaataaaaattattatagtggtggaattcagttggaatattgcctccggagtcataaaaggatactaaacattgttttttatcataaattacacatttccaatgagacaaataacaaaatccaaacattacaaatctagaggtagaacttttaattttgtctttaagtatatacgataagatatgtttattcataaacgcgtcaaatttttcatgaatcgctaaggagtttaagaatctcatgtcaaattgtcctatataatccacttcggatccataagcaaactgagagactaagttcttaatacttcgattgctcatccaggctcctctctcaggctctattttcatcttgacgacctttggattttcaccagtatgtattcctttacgtgataaatcatcgattttcaaatccatttgtgagaagtctatcgccttagatactttttcccgtagtcgaggtttaaagaaatacgctaacggtatactagtaggtaactcaaagacatcatatatagaatggtaacgcgtctttaactcgtcggttaactctttcttttgatcgagttcgtcgctactattgggtctgctcaggtgccccgactctactagttccaacatcataccgataggaatacaagacactttgccggcggttgtagatttatcatatttctccactacatatccgttacaatttgttaaaaatttagatacatctatattgctacataatccagctagtgaatatatatgacataataaattggtaaatcctagttctggtattttactaattactaaatctgtatatctttccatttatcatggaaaagaatttaccagatatcttcttttttccaaactgcgttaatgtattctcttacaaatattcacaagatgaattcagtaatatgagtaaaacggaacgtgatagtttctcattggcggtgtttccagttataaaacatagatggcataacgcacacgttgtaaaacataaaggaatatacaaagttagtacagaagcacgtggaaaaaaagtatctcctccatcactaggaaaacccgcacacataaacctaaccgcgaagcaatatatatacagtgaacacacaataagctttgaatgttatagttttctaaaatgtataacaaatacagaaatcaattcgttcgatgagtatatattaagaggactattagaagctggtaatagtttacagatattttccaattccgtaggtaaacgaacagatactataggtgtactagggaataagtatccatttagcaaaattccattggcctcattaactcctaaagcacaacgagagatattttcagcgtggatttctcatagacctgtagttttaactggaggaactggagtgggtaagacgtcacaggtacccaagttattgctttggtttaattatttatttggtggattctctactctagataaaatcactgactttcacgaaagaccagtcattctatctcttcctaggatagctttagttagattgcatagcaataccattttaaaatcattgggatttaaggtactagatggatctcctatttctttacggtacggatctataccggaagaattaataaacaaacaaccaaaaaaatatggaattgtattttctacccataagttatctctaacaaaactatttagttatggcactcttattatagacgaagttcatgagcatgatcaaataggagatattattatagcagtagcgagaaagcatcatacgaaaatagattctatgtttttaatgactgccacgttagaggatgacagggaacggctaaaagtatttttacctaatcccgcatttatacatattcctggagatacactgtttaaaattagcgaggtatttattcataataagataaatccatcttccagaatggcatacatagaagaagaaaagagaaatttagttactgctatacagatgtatactcctcctgatggatcatccggtatagtctttgtggcatccgttgcacagtgtcacgaatataaatcatatttagaaaaaagattaccgtatgatatgtatattattcatggtaaggtcttagatatagacgaaatattagaaaaagtgtattcatcacctaatgtatcgataattatttctactccttatttggaatccagcgttactatacgcaatgttacacacatttatgatatgggtagagtttttgtccccgctccttttggaggatcgcaagaatttatttctaaatctatgagagatcaacgaaaaggaagagtaggaagagttaatcctgggacatacgtatatttctatgatctgtcttatatgaagtctatacagcgaatagattcagaatttctacataattatatattgtacgctaataagtttaatctaacactccccgaagatttgtttataatccctacaaatttggatattctatggcgtacaaaggaatatatagactcgttcgatattagtacagaaacatggaataaattattatccaattattatatgaagatgatagagtatgctaaactttatgtactaagtcctattctcgctgaggagttggataattttgagaggacgggagaattaactagtattgtacaagaagccattttatctctaaatttacgaattaagattttaaattttaaacataaagatgatgatacgtatatacacttttgtaaaatattattcggtgtctataacggaacaaacgctactatatattatcatagacctctaacgggatatatgaatatgatttcagatactatatttgttcctgtagataataactaaaaatcaaactctaatgaccacatctttttttagagatgaaaaattttccacatctccttttgtagacacgactaaacattttgcagaaaaaagtttattagtgtttagataatcgtatacttcatcagtgtagatagtaaatgtgaacagataaaaggtattcttgctcaatagattggtaaattccatagaatatattaatcctttcttcttgagatcccacatcatttcaaccagagacgttttatccaatgatttacctcgtactataccacatacaaaactagattttgcagtgacgtcgtatctggtattcctaccaaacaaaattttacttttagttcttttagaaaattctaaggtagaatctctatttgccaatatgtcatctatggaattaccactagcaaaaaatgatagaaatatatattgatacatcgcagctggttttgatctactatactttaaaaacgaatcagattccataattgcctgtatatcatcagctgaaaaactatgttttacacgtattccttcggcatttctttttaatgatatatcttgtttagacaatgataaagttatcatgtccatgagagacgcgtctccgtatcgtataaatatttcattagatgttagacgcttcattaggggtatacttctataaggtttcttaatcagtccatcattggttgcgtcaagaactactatcggatgttgttgggtatctctagtgttacacatggccttactaaagtttgggtaaataactatgatatctctattaattatagatgcatatatttcatttgtcaaggatattagtatcgacttgctatcgtcattaatacgtgtaatgtaatcatataaatcatgcgatagccaaggaaaatttaaatagatgttcatcatataatcgtcgctataattcatattaatacgttgacattgactaatttgtaatatagcctcgccacgaagaaagctctcgtattcagtttcatcgataaaggataccgttaaatataactggttgccgatagtctcatagtctattaagtggtaagtttcgtacaaatacagaatccctaaaatattatctaatgttggattaatctttaccataactgtataaaatggagacggagtcataactattttaccgtttgtacttactggaatagacgaaggaataatctccggacatgctggtaaagacccaaatgtctgtttgaagaaatccaatgttccaggtcctaatctcttaacaaaaattacgatattcgatcccgatatcctttgcattctatttaccagcatatcacgaactatattaagattatctatcatgtctattctcccaccgttatataaatcgcctccgctaagaaacgttagtatatccatacaatggaatacttcatttctaaaatagtattcgttttctaattctttaatgtgaaatcgtatactagaaagggaaaaattatctttgagttttccgttagaaaagaaccacgaaactaatgttctgattgcgtccgattccgttgctgaattaatggatttacaccaaaaactcatataacttctagatgtagaagcattcgctaaaaaattagtagaatcaaaggatataagtagatgttccaacaagtgagcaattcccaagatttcatctatatcattctcgaatccgaaattagaaattcccaagtagatatcctttttcatccgatcgttgatgaaaatacgaactttattcggtaagacaatcatttactaaggagtaaaataggaagtaatgttcgtatgtcgttatcatcgtataaattaaaggtgtgttttttaccattaagtgacattataattttaccaatattggaattataatataggtgtatttgcgcactcgcgacggttgatgcatcggtaaatatagctgtatctaatgttctagtcggtatttcatcatttcgctgtctaataatagcgttttctctatctgtttccattacagctgcctgaagtttattggtcggataatatgtaaaataataagaaatacatacgaataacaaaaataaaataagatataataaagatgccatttagagatctaattttgtttaacttgtccaaattcctacttacagaagatgaggaatcgttggagatagtgtcttccttatgtagaggatttgaaatatcttatgatgacttgataacttactttccagataggaaataccataaatatatttctaaagtatttgaacatgtagatttatcggaggaattaagtatggaattccatgatacaactctgagagatttagtctatcttagattgtacaagtattccaagtgtatacggccgtgttataaattaggagataatctaaaaggcatagttgttataaaggacaggaatatttatattagagaagcaaatgatgacttgatagaatatctcctcaaggaatacactcctcagatttatacatattctaatgagcgcgtccccataactggttcaaaattaattctttgtggattttctcaagttacatttatggcgtatacaacgtcgcatataacaacaaataaaaaggtagatgttctcgtttccaaaaaatgtatagatgaactagtcgatccaataaattatcaaatacttcaaaatttatttgataaaggaagcggaacaataaacaaaatactcaggaagatattttattcggtaaccggtggccaaactccataatttgctttttctatttcggattttagaatttccaaattcaccagcgatttatcggttttggtgaaatccaaggatttattaatgtccacaaatgccatttgttttgtctgtggattgtatttgaaaatggaaacgatgtagttagatagatgcgctgcaaagtttcctattagggttccgcgctttacgtcacccagcatacttgaatcaccatcctttaaaaaaaatgataagatatcaacatggagtatatcatactcggattttaattcttctactgcatcactgacattttcacaaatactacaatacggtttaccgaaaataatcagtacgttcttcatttatgggtatcaaaaacttaaaatcgttactgctggaaaataaatcactgacgatattagatgataatttatacaaagtatacaatggaatatttgtggatacaatgagtatttatatagccgtcgccaattgtgtcagaaacttagaagagttaactacggtattcataaaatacgtaaacggatgggtaaaaaagggagggcatgtaaccctttttatcgatagaggaagtataaaaattaaacaagacgttagagacaagagacgtaaatattctaaattaaccaaggacagaaaaatgctagaattagaaaagtgtacatccgaaatacaaaatgttaccggatttatggaagaagaaataaaggcagaaatgcaattaaaaatcgataaactcacatttcaaatatatttatctgattctgataacataaaaatatcattgaatgagatactaacacatttcaacaataatgagaatgttacattattttattgtgatgaacgagacgcagaattcgttatgtgtctcgaggctaaaacacatttctctaccacaggagaatggccgttgataataagtaccgatcaggatactatgctatttgcatctactgataatcatcctaagatgataaaaaacttaactcaactgtttaaatttgttccctcggcagaggataactatttagcaaaattaacggcgttagtgaatggatgtgatttctttcctggactctatggggcatctataacacccaccaacttaaacaaaatacaattgtttagtgattttacaatcgataatatagtcactagtttggcaattaaaaattattatagaaagactaactctaccgtagacgtgcgtaatattgttacgtttataaacgattacgctaatttagacgatgtctactcgtatgttcctccttgtcaatgcactgttcaagaatttatattttccgcattagatgaaaaatggaacaattttaaatcatcttatttagagaccgttccgttaccctgccaattaatgtatgcattagaaccacgcaaggagattgatgtttcagaagttaaaactttatcatcttatatagatttcgaaaatactaaatcagatatcgatgttataaaatctatatcttcgatcttcggatattctaacgaaaactgtaacactatagtgttcggcatctataaggataatttactactgagtataaatagttcattttactttaacgatagtctgttaataaccaatactaaaagtgataatataataaatataggttactagattaaaaatggtgttccaactcgtgtgctctacgtgcggcaaagatatttctcacgaacgatataaattgattatacgaaaaaaatcattaaaggatgtactcgtcagtgtaaagaacgaatgttgtaggttaaaattatctacacaaatagaacctcaacgtaacttaacagtgcaacctctattggatataaactaatatggatccggttaattttatcaagacatatgcgcctagaggttctattatttttattaattataccatgtcattaacaagtcatttgaatccatcgatagaaaaacatgtgggtatttattatggtacgttattatcggaacacttggtagttgaatctacctatagaaaaggagttcgaatagtcccattggatagtttttttgaaggatatcttagtgcaaaagtatacatgttagagaatattcaagttatgaaaatagcagctgatacgtcattaactttattgggtattccgtatggatttggtcataatagaatgtattgttttaaattggtagctgaatgttataaaaatgccggtattgatacatcgtctaaacgaatattaggtaaagatatttttctgagccaaaacttcacagatgataatagatggataaagatatatgattctaataatttaacattttggcaaattgattaccttaaagggtgagttaatatgcataactactcctccgttgttttttccctcgttctttttcttaacgttgtttgccatcactctcataatgtaaagatattctaaaatggtaaacttttgcatatcggacgcagaaattggtataaatgttgtaattgtattatttcccgtcaatggactagtcacagctccatcagttttatatcctttagagtatttctcactcgtgtctaacattctagagcattccatgatctgtttatcgttgatattggccggaaagatagattttttattttttattatattactattggcaattgtagatataacttctggtaaatatttttctaccttttcaatctcttctattttcaagccggctatatattctgctatattgttgctagtatcaataccttttctggctaagaagtcatatgtggtattcactatatcagttttaactggtagttccattagcctttccacttctgcagaataatcagaaattggttctttaccagaaaatccagctactataataggctcaccgatgatcattggcaaaatcctatattgtaccagattaatgagagcatatttcatttccaataattctgctagttcttgagacattgatttatttgatgaatctagttggttctctagatactctaccatttctgccgcatacaataacttgttagataaaatcagggttatcaaagtgtttagcgtggctagaatagtgggcttgcatgtattaaagaatgcggtagtatgagtaaaccgttttaacgaattatatagtctccagaaatctgtggcgttacatacatgagccgaatgacatcgaagattgtccaatatttttaatagctgctctttgtccattatttctatatttgactcgcaacaattgtagataccattaatcactgattcctttttcgatgccggacaatagcacaattgtttagctttggactctatgtattcagaattaatagatatatctctcaatacagattgcactatacattttgaaactatgtcaaaaattgtagaacgacgctgttctgcagccatttaactttaaataatttacaaaaatttaaaatgagcatccgtataaaaatcgataaactgcgccaaattgtggcatatttttcagagttcagtgaagaagtatctataaatgtagactcgacggatgagttaatgtatatttttgccgccttgggcggatctgtaaacatttgggccattatacctctcagtgcatcagtgttctaccgcggagccgaaaacattgtgtttaatcttcctgtgtccaaggtaaaatcgtgtttgtgtagttttcacaatgatgccatcatagatatagaacctgatctggaaaataatctagtaaaactttctagttatcatgtagtaagtgtcgattgtaacaaggaactgatgcctattaggacagatactactatttgtctaagtatagatcaaaagaaatcttacgtgtttaattttcacaagtatgaagaaaaatgttgtggtagaaccgtcattcatttagaatggttgttgggctttatcaagtgtattagtcagcatcagcatttggctattatgtttaaagatgacaatattattatgaagactcctggtaatactgatgcgttttccagggaatattctatgactgaatgttctcaagaactacaaaagttttctttcaaaatagctatctcgtctctcaacaaactacgaggattcaaaaagagagtcaatgtttttgaaactagaatcgtaatggataatgacgataacattctaggaatgttgttttcggatagagttcaatcctttaagatcaacatctttatgacgtttttagattaatactttcaatgagataaatatgggtggcagagtaagtgttgagctccctaaacgggatccgcctccgggagtacccactgatgagatgttattaaacgtggataaaatgcatgacgtgatagctcccgctaagcttttagaatatgtgcatataggaccactagcaaaagataaagaggataaagtaaagaaaagatatccagagtttagattagtcaacacaggacccggtggtctttcggcattgttaagacaatcgtataatggaaccgcacccaattgctgtcgcacttttaatcgtactcattattggaaaaaggatggaaagatatcagataagtatgaagagggtgcagtattagaatcgtgttggccagacgttcacgacactggaaaatgcgatgttgatttattcgactggtgtcagggggatacgttcgatagaaacatatgccatcagtggatcggttcagcctttaataggagtgatagaactgtagagggtcaacaatcgttaataaatctgtataataagatgcaaacattatgtagtaaagatgctagtgtaccaatatgtgaatcatttttgcatcatttacgcgcacacaatacagaagatagcaaagagatgatcgattatattctaagacaacagtctgcggactttaaacagaaatatatgagatgtagttatcccactagagataagttagaagagtcattaaaatatgcggaacctcgagaatgttgggatccagagtgttcgaatgccaatgttaatttcttactaacacgtaattataataatttaggactttgcaatattgtacgatgtaatactagcgtgaacaacttacagatggataaaacttcctcattaagattgtcatgtggattaagcaatagtgatagattttctactgttcccgtcaatagagcaaaagtagttcaacataatattaaacattcgttcgacctaaaattgcatttgatcagtttattatctctcttggtaatatggatactaattgtagctatttaaatgggtgccgcggcaagcatacagacgacggtgaatacactcagcgaacgtatctcgtctaaattagaacaagaagcgaacgctagtgctcaaacaaaatgtgatatagaaatcggaaatttttatatccgacaaaaccatggatgtaacctcactgttaaaaatatgtgctctgcggacgcggatgctcagttggatgctgtgttatcagccgctacagaaacatatagtggattaacaccggaacaaaaagcatacgtaccagctatgtttactgctgcgttaaacattcagacgagtgtaaacactgttgttagagattttgaaaattatgtgaaacagacttgtaattctagcgcggtcgtcgataacaaattaaagatacaaaacgtaatcatagatgaatgttacggagccccaggatctccaacaaatttggaatttattaatacaggatctagcaaaggaaattgtgccattaaagcgttgatgcaattgacgactaaggccactactcaaatagcacctagacaagttgctggtacaggagttcagttttatatgattgttatcggtgttataatattggcagcgttgtttatgtactatgccaagcgtatgttgttcacatccaccaatgataaaatcaaacttattttagccaataaggaaaacgtccattggactacttacatggacacattctttagaacttctccgatggttattgctaccacggatatgcaaaactgaaaatatattgataatattttaatagattaacatggaagttatcgctgatcgtctagacgatatagtgaaacaaaatatagcggatgaaaaatttgtagattttgttatacacggtctagagcatcaatgtcctgctatacttcgaccattaattaggttgtttattgatatactattatttgttatagtaatttatatttttacggtacgtctagtaagtagaaattatcaaatgttgttggcgttggtggcgctagtcatcacattaactattttttattactttatactataatagtactagactgacttctaacaaacatctcacctgccataaataaatgcttgatattaaagtcttctatttctaacactattccatctgtggaaaataatactctgacattatcgctaattgacacatcggtgagtgatatgcctataaagtaataatcttctttgggcacatataccagtgtaccaggttctaacaacctatttactggtgctcctgtagcatactttttctttaccttgagaatatccatcgtttgcttggtcaatagcgatatgtgattttttatcaaccactcaaaaaagtaattggagtgttcatatcctctacgggctattgtctcatggccgtgtatgaaatttaagtaacacgactgtggtagatttgttctatagagccggttgccgcaaatagatagaactaccaatatgtctgtacaaatgttaaacattaattgattaacagaaaaaacaatgttcgttctgggaatagaaaccagatcaaaacaaaattcgttagaatatatgccacgtttatacatggaatataaaataactacagtttgaaaaataacagtatcatttaaacatttaacttgcggggttaatttcacaactttactgtttttaaactgttcaaaatatagcatcgatccatgagaaatacgtttagccgcctttaatagaggaaatcccaccgcctttctggatctcaccaacgacgatagttctgaccagcaacttatttcttcatcatccacctgttttaacatataataggcaggagatagatatccgtcattgcaatattccttttcgtaggcacacaatctaatattgataaaatctccattctcttctctgcatttattatcttgtttcggtggctgattaggctgtagtcttggtttaggctttggtatatcgttgttgaatctattttggtcattaaatctttcatttcttcctggtatatttctatcacctcgtttggttggatttttgtctatattatcgtttgtaacatcggtacgggtattcatttatcacaaaaaaaacttctctaaatgagtctactgctagaaaacctcatcgaagaagataccatattttttgcaggaagtatatctgagtatgatgatttacaaatggttattgccggcgcaaaatccaaatttccaagatctatgctttctatttttaatatagtacctagaacgatgtcaaaatatgagttggagttgattcataacgagaatatcacaggggcaatgtttaccacaatgtataatataagaaacaatttgggtctaggagatgataaactaactattgaagccattgaaaactatttcttggatcctaacaatgaggttatgcctcttatcattaataatacggatatgactgccgtcattcctaaaaaaagtggtaggagaaagaataagaacatggttattttccgtcaaggatcatcacctatcttgtgtattttcgaaactcgtaaaaagattaatatttataaagaaaatatggaatccgcgtcgactgagtatacacctatcggagacaacaaggctttgatatctaaatatgcgggaattaatgtcctgaatgtgtattctccttccacatccatgagattgaatgccatttacggattcaccaataaaaataaactagagaaacttagtactaataaggaactagaatcgtatagttctagccctcttcaagaacccattaggttaaatgattttctgggactattggaatgtgttaaaaagaatattcctctaacagatattccgacaaaggattgattactataaatggagaatgttcctaatgtatactttaatcctgtgtttatagagcccacgtttaaacattctttattaagtgtttataaacacagattaatagttttatttgaagtattcattgtattcattctaatatatgtattttttagatctgaattaaatatgttcttcatgcctaaacgaaaaatacccgatcctattgatagattacgacgtgctaatctagcgtgtgaagacgataaattaatgatctatggattaccatggatgacaactcaaacatctgcgttatcaataaatagtaaaccgatagtgtataaagattgtgcaaagcttttgcgatcaataaatggatcacaaccagtatctcttaacgatgttcttcgcagatgatgattcattttttaagtatttggctagtcaagatgatgaatcttcattatctgatatattgcaaatcactcaatatctagactttctgttattattattgatccaatcaaaaaataaattagaagccgtgggtcattgttatgaatctctttcagaggaatacagacaattgacaaaattcacagactttcaagattttaaaaaactgtttaacaaggtccctattgttacagatggaagggtcaaacttaataaaggatatttgttcgactttgtgattagtttgatgcgattcaaaaaagaatcctctctagctaccaccgcaatagatcctattagatacatagatcctcgtcgcgatatcgcattttctaacgtgatggatatattaaagtcgaataaagtgaacaataattaattctttattgtcatcatgaacggcggacatattcagttgataatcggccccatgttttcaggtaaaagtacagaattaattagacgagttagacgttatcaaatagctcaatataaatgcgtgactataaaatattctaacgataatagatacggaacgggactatggacgcatgataagaataattttgaagcattggaagcaactaaactatgtgatgtcttggaatcaattacagatttctccgtgataggtatcgatgaaggacagttctttccagacattgttgaattctgtgagcgtatggcaaacgaaggaaaaatagttatagtagccgcactcgatgggacatttcaacgtaaaccgtttaataatattttgaatcttattccattatctgaaatggtggtaaaactaactgctgtgtgtatgaaatgctttaaggaggcttccttttctaaacgattgggtgaggaaaccgagatagagataataggaggtaatgatatgtatcaatcggtgtgtagaaagtgttacgtcggctcataatattatattttttatctaaaaaactaaaaataaacattgattaaattttaatataatacttaaaaatggatgttgtgtcgttagataaaccgtttatgtattttgaggaaattgataatgagttagattacgaaccagaaagtgcaaatgaggtcgcaaaaaaactgccgtatcaaggacagttaaaactattactaggagaattattttttcttagtaagttacagcgacacggtatattagatggtgccaccgtagtgtatataggatctgctcccggtacacatatacgttatttgagagatcatttctataatttaggagtgatcatcaaatggatgctaattgacggccgccatcatgatcctattttaaatggattgcgtgatgtgactctagtgactcggttcgttgatgaggaatatctacgatccatcaaaaaacaactgcatccttctaagattattttaatttctgatgtgagatccaaacgaggaggaaatgaacctagtacggcggatttactaagtaattacgctctacaaaatgtcatgattagtattttaaaccccgtggcgtctagtcttaaatggagatgcccgtttccagatcaatggatcaaggacttttatatcccacacggtaataaaatgttacaaccttttgctccttcatattcagctgaaatgagattattaagtatttataccggtgagaacatgagactgactcgagttaccaaatcagacgctgtaaattatgaaaaaaagatgtactaccttaataagatcgtccgtaacaaagtagttgttaactttgattatcctaatcaggaatatgactattttcacatgtactttatgctgaggaccgtgtactgcaataaaacatttcctactactaaagcaaaggtactatttctacaacaatctatatttcgtttcttaaatattccaacaacatcaactgaaaaagttagtcatgaaccaatacaacgtaaaatatctagcaaaaattctatgtctaaaaacagaaatagcaagagatccgtacgcagtaataaatagaaacgtactactgagatatactaccgatatagagtataatgatttagttactttaataaccgttagacataaaattgattctatgaaaactgtgtttcaggtatttaacgaatcatccataaattatactccggttgatgatgattatggagaaccaatcattataacatcgtatcttcaaaaaggtcataacaagtttcctgtaaattttctatacatagatgtggtaatatctgacttatttcctagctttgttagactagatactacagaaactaatatagttaatagtgtactacaaacaggcgatggtaaaaagactcttcgtcttcccaaaatgttagagacggaaatagttgtcaagattctctaccgtcctaatataccattaaaaattgttagatttttccgcaataacatggtaactggagtagagatagccgatagatctgttatttcagtcgctgattaatcaattagtagagatgagataagaacattataataatcaataatatattttatatcttatatcttgtttagaaaaatgctaatattaaaatagctaacgctagtaatccaatcggaagccatttgatatctataatagggtatctaatttcctgattcagatagcggacagctatattctcggtagctactcgtttggaatcacaaacattatttacatctaatttactatctgtaatggaaacgtttcccaatgaaatggtacaatccgatacattgcattttgttatatttttttttaaagaggctggtaacaacgcatcgcttcgtttacatggctcgtaccaacaataatagggtaatcttgtatctattcctatccgtactatgcttttatcaggataaatacatttacatcgtatatcgtctttgttagcatcacagaatgcataaatttgttcgtccgtcatgataaaaatttaaagtgtaaatataactattattttatagttgtaataaaaagggaaatttgattgtatactttcggttctttaaaagaaactgacttgataaaaatggctgtaatctctaaggttacgtatagtctatatgatcaaaaagagattaatgctacagatattatcattagtcatgttaaaaatgacgacgatatcggtaccgttaaagatggtagactaggtgctatggatggggcattatgtaaaacttgtgggaaaacggaattggaatgtttcggtcactggggtaaagtaagtatttataaaactcatatagttaagcctgaatttatttcagaaattattcgtttactgaattatatatgtattcactgcggattattgcgttcacgagaaccgtattccgacgatattaacctaaaagagttatcgggacacgctcttaggagattaaaggataaaatattatccaagaaaaagtcatgttggaacagtgaatgtatgcaaccgtatcaaaaaattactttttcaaagaaaaaggtttgtttcgtcaacaagttggatgatattaacgttcctaattctctcatctatcaaaagttaatttctattcatgaaaagttttggccattattagaaattcatcaatatccagctaacttattttatacagactactttcccatccctccgttgattattagaccggctattagtttttggatagatagtatacccaaagaaaccaatgaattaacttacttattaggtatgatcgttaagaattgtaacttgaatgctgatgaacaggttatccagaaggcggtaatagaatacgatgatattaaaattatttctaataacacttccagtatcaatttatcatatatcacatccggcaaaaataatatgattagaagttatatcgtcgcccggcgaaaagatcagaccgctagatctgtaattggtcccagtacatctatcaccgttaatgaggtaggaatgcccgcatatattagaaatacacttacagaaaagatatttgttaatgcctttacagtggataaagttaaacaactattagcgtcaaaccaagttaaattttactttaataaacgattaaaccaattaacaagaatacgccaaggaaagtttatcaaaaataaaatacatttattgcctggtgattgggtagaagtagctgttcaagaatatacaagtattatttttggaagacagccgtctctacatagatacaacgtcatcgcttcatctatcagagctaccgaaggagatactatcaaaatatctcccggaattgtcaactctcaaaatgctgatttcgacggagatgaagaatggatgatattggagcaaaatcctaaagccgtaattgaacaaagtattcttatgtatccgacgacgttactcaaacacgatattcatggagcccccgtttatggatctattcaagatgaaatcgtagcagcgtattcattgtttaggatacaagatctttgtttagatgaagtattgaacatcttggggaaatatggaagagagttcgatcctaaaggtaaatgtaaattcagcggtaaagatatctatacttacttgataggtgaaaagattaattatccgggtctcttaaaggatggtgaaattattgcaaacgacgtagatagtaattttgttgtggctatgaggcatctgtcattggctggactcttatccgatcataagtcgaacgtggaaggtatcaactttattatcaagtcatcttatgtttttaagagatatctatctatttacggttttggggtgacattcaaagatctgagaccaaattcgacgttcactaataaattggaggccatcaacgtagaaaaaatagaacttatcaaagaagcatacgccaaatatctcaacgatgtaagagacgggaaaatagttccattatctaaagctttagaggcggactatgtggaatccatgttatccaacttgacaaatcttaatatccgagagatagaagaacatatgagacaaacgctgatagatgatccagataataacctcctgaaaatggccaaagcgggttataaagtaaatcccacagaactaatgtatattctaggtacttatggacaacagaggattgatggtgaaccagcagagactcgagtattgggtagagtcttaccttactatcttccagactctaaggatccagaaggaagaggttacattcttaattctttaacaaaaggattaacgggttctcaatattacttttcgatgctggttgcaagatctcaatctactgatatcgtctgtgaaacatcacgtaccggaacactggctagaaaaatcattaaaaagatggaggatatggtggtcgacggatacggacaagtagttataggtaatacgctcatcaagtacgccgccaattataccaaaattctaggctcagtatgtaaacctgtagatcttatctatccagatgagtccatgacttggtatttggaaattagtgctctgtggaataaaataaaacagggattcgtttactctcagaaacagaaacttgcaaaaaagacattggcgccgtttaatttcctagtattcgtcaaacccaccactgaggataatgctattaaggttaaggatctgtacgatatgattcataacgtcattgatgatgtgagagagaaatacttctttacggtatctaatatagattttatggagtatatattcttgacgcatcttaatccttctagaattagaattacaaaagaaacggctatcactatctttgaaaagttctatgaaaaactcaattatactctaggtggtggaactcctattggaattatttctgcacaggtattgtctgagaagtttacacaacaagccctgtccagttttcacactactgaaaaaagtggtgccgtcaaacaaaaacttggtttcaacgagtttaataacttgactaatttgagtaagaataagaccgaaattatcactctggtatccgatgatatctctaaacttcaatctgttaagattaatttcgaatttgtatgtttgggagaattaaatccaaacatcactcttcgaaaagaaacagataggtatgtagtagatataatagtcaatagattatacatcaagagagcagaaattaccgaattagtcgtcgaatatatgattgaacgattcatctcctttagcgtcattgtaaaggaatggggtatggaaacattcattgaggatgaggataatattagatttactgtctacctaaatttcgttgaaccggaagaattgaatcttagtaagtttatgatggttcttccgggtgccgccaacaagggcaagattagtaaattcaagattcctatctctgattatacgggatatgacgacttcaatcaaacaaaaaagctcaataagatgactgtagaactcatgaatctaaaagaattgggttctttcgatttggaaaacgtcaacgtgtatcctggagtatggaatacatacgatatcttcggtatcgaggccgctcgtgaatacttgtgcgaagccatgttaaacacctatggagaagggttcgattatctgtatcagccttgtgatcttctcgctagtttactatgtgctagttacgaaccagaatcagtgaataaattcaagttcggcgcagctagtactcttaagagagctacgttcggagacaataaagcattgttaaacgcggctcttcataaaaagtcagaacctattaacgataatagtagctgccacttttttagcaaggtccctaatataggaactggatattacaaatactttatcgacttgggtcttctcatgagaatggaaaggaaactatctgataagatatcttctcaaaagatcaaggaaatggaagaaacagaagacttttaattcttatcaataacatatttttctatgatctgtcttttaaacgatggattttccacaaatgcgcctctcaagtccctcatagaatgatacacgtataaaaaatatagcataggcaatgactccttatttttagacattagatatgccaaaatcatagccccgcttctatttactcccgcagcacaatgaaccaacacgggctcgtttcgttgatcacatttagataaaaaggcggttacgtcgtcaaaatatttactaatatcggtagttgtatcatctaccaacggtatatgaataatattaatattagagttaggtaatgtatatttatccatcgtcaaatttaaaacatatttgaacttaacttcagatgatggtgcatccatagcatttttataatttcccaaatacacattattggttactcttgtcattatagtgggagatttggctttgtgcatatctccagttgaacgtagtagtaagtatttatacaaacttttcttatccatttataacgtacaaatggataaaactactttatcggtaaacgcgtgtaatttagaatacgttagagaaaaggctatagtaggcgtacaagcagccaaaacatcaacacttatattctttgttattatattggcaattagtgcgctattactctggtttcagacgtctgataatccagtctttaatgaattaacgagatatatgcgaattaaaaatacggttaacgattggaaatcattaacggatagcaaaacaaaattagaaagtgatagaggtagacttctagccgctggtaaggatgatatattcgaattcaaatgtgtggatttcggcgcctattttatagctatgcgattggataagaaaacatatctgccgcaagctattaggcgaggtactggagacgcgtggatggttaaaaaggcggcaaaggtcgatccatctgctcaacaattttgtcagtatttgataaaacacaagtctaataatgttattacttgtggtaatgagatgttaaatgaattaggttatagcggttattttatgtcaccgcattggtgttccgattttagtaatatggaatagtgttagataaatgcggtaacgaatgttcctgtaaggaaccataacagcttagatttaacgttaaagatgagcataaacataataaacaaaattacaatcaaacctataacattaatatcaaacaatccaaaaaatgaaatcagtggagtagtaaacgcgtacataactcctggataacgtttagcagctgccgttcctattctagaccaaaaattcggtttcatgttttcgaaacggtattctgcaacaagtcgaggatcgtgttctacatatttggcggcgttatccagtatctgcctattgatcttcatttcgttttcgattctggctatttcaaaataaaatcccgatgatagacctccagactttataatttcatctacgatgttcagcgccgtagtaactctaataatataggctgataagctaacatcataccctcctgtatatgtgaatatggcatgatttttgtccattacaagctcggttttaactttattgcctgtaataatttctctcatctgtaggatatctatttttttgtcatgcattgccttcaagacgggacgaagaaacgtaatatcctcaataacgttatcgttttctacaataactacatattctacctttttattttctaactcggtaaaaaaattagaatcccatagggctaaatgtctagcgatatttcttttcgtttcctctgtacacatagtgttacaaaaccctgaaaagaagtgagtatacttgtcatcatttctaatgtttcctccagtccactgtataaacgcataatccttgtaatgatctggatcatccttgactaccacaacatttcttttttctggcataacttcattgtcctttacatcatcgaacttctgatcattaatatgctcatgaacattaggaaatgtttctgatggaggtctatcaataactggcacaacaataacaggagttttcaccgccgccatttagttattgaaattaatcatatacaactctttaatacgagttatattttcgtctatccattgtttcacatttacatatttcgacaaaaagatataaaatgcgtattccaatgcttctctgtttaatgaattactaaaatatacaaacacgtcactgtctggcaataaatgatatcttagaatattgtaacaatttattttgtattgcacatgttcgtgatctatgagttcttcttcgaatggcataggatctccgaatctgaaaacgtataaataggagttagaataataatatttgagagtattggtaatatataaactctttagcggtataattagtttttttctctcgatttctatttttagatgtgatggaaaaatgactaattttgtagcattagtatcatgaactctaatcgagatcttaatatcttcgtcacacgttagttctttgaagtttttaagagatgcatcagttggttcgaccgatggagtaggtgcaacaattttttgttcgatgtatgtatgtactggagccattgtcttaactataatggtgcttgtatcgaaaaactttaatgcagataatggaagctcttcgccgcgactttctacatcgtaattgggttctaacgccgatctctgaatggatactagttttctaagttctaatgtgattctctgaaaatgtaaatccaattcctccggcattatagatgtgtatacatcggtaaataaaactatagtatccaacgatcccttctcgcaaattctagtcttaaccaaaaaatcgtatataaccacggagatggcgtatttaagagtggattcttctaccgttttgttcttggatttcatataagaaactataaagtccgcactactgttaagaatgattactaacgcaactatatagtttaaattaagcatcttggaaacataaaataactctgtagacgatacttgactttcgaataagtttgcagacaaacgaagaaagaacagacctctcttaatttcagaagaaaactttttttcgtattcctgacgtctagagtttatatcaataagaaagttaagaattagtcggttaatgttgtatttcattacccaagtttgagatttcataatattatcaaaagacatgataatattaaagataaagcgctgactatgaacgaaatagctatatggttcgctcaagaatatagtcttgttaaacgtggaaacgataactgtatttttaatcacgtcagcggcatctaaattaaatataggtatatttattccacacactctacaatatgccacaccatcttcataataaataaattcgttagcaaaattattaattttagtgaaatagttagcgtcaactttcatagcttccttcaatctaatttgatgctcacacggtgcgaattccactctaacatcccttttccatgcctcaggttcatcgatctctataatatctagttttttgcgtttcacaaacacaggctcgtctctcgcgatgagatctgtatagtaactatgtaaatgataactagatagaaagatgtagctatatagatgacgatcctttaagagaggtatgatgactttaccccaatcagatagactgttgttatggtcttcggaaaaagaatttttataaatttttccagtattttccaaatatacgtacttaacatctaaaaaatccttaatgataataggaatggataatccgtctattttataaagaaatacatatcgcacattatacttttttttggaaatgggaataccgatgtgtctacataaatatgcaaagtctaaatattttttagagaatcttagttggtccaaattcttttccaagtacggtaatagatttttcatattgaacggtatcttcttaatctctggttctagttccgcattaaatgatgaaactaagtcactatttttataactaacgattacatcacctctaacatcatcatttaccagaatactgatcttcttttgtcgtaaatacatgtctaatgtgttaaaaaaaagatcatacaagttatacgtcatttcatctgtggtattcttgtcattgaaggataaactcgtactaatctcttctttaacagcctgttcaaatttatatcctatatacgaaaaaatagcaaccagtgtttgatcatccgcgtcaatattctgttctatcgtagtgtataacaatcgtatatcttcttctgtgatagtcgatacgttataaaggttgataacgaaaatatttttatttcgtgagataaagtcatcgtaggattttggacttatattcgcgtctagtagatatgcttttatttttggaatgatctcaattagaatagtctctttagagtccatttaaagttacaaacaactaggaaattggtttatgatgtataatttttttagtttttatagattctttattctatacttaaaaaatgaaaataaatacaaaggttcttgagggttgtgttaaattgaaagcgagaaataatcataaattatttcattatcgcgatatccgttaagtttgtatcgtaatggcgtggtcaattacaaataaagcggatactagtagcttcacaaagatggctgaaatcagagctcatctaaaaaatagcgctgaaaataaagataaaaacgaggatattttcccggaagatgtaataattccatctactaagcccaaaaccaaacgagccactactcctcgtaaaccagcggctactaaaagatcaaccaaaaaggaggaagtggaagaagaagtagttatagaggaatatcatcaaacaactgaaaaaaattctccatctcctggagtcagcgacattgtagaaagcgtggctgctgtagagctcgatgatagcgacggggatgatgaacctatggtacaagttgaagctggtaaagtaaatcatagtgctagaagcgatctttctgacctaaaggtggctaccgacaatatcgttaaagatcttaagaaaattattactagaatctctgcagtatcgacggttctagaggatgttcaagcagctggtatctctagacaatttacttctatgactaaagctattacaacactatctgatctagtcaccgagggaaaatctaaagttgttcgtaaaaaagttaaaacttgtaagaagtaaatgcgtgcacttttttataaagatggtaaactctttaccgataataattttttaaatcctgtatcagacgataatccagcgtatgaggttttgcaacatgttaaaattcctactcatttaacagatgtagtagtatatgaacaaacgtgggaggaggcgttaactagattaatttttgtgggaagtgattcaaaaggacgtagacaatacttttacggaaaaatgcatgtacagaatcgcaacgctaaaagagatcgtatttttgttagagtatataacgttatgaaacgaattaattgttttataaacaaaaatataaagaaatcgtccacagattccaattatcagttggcggtttttatgttaatggaaactatgttttttattagatttggtaaaatgaaatatcttaaggagaatgaaacagtagggttattaacactaaaaaataaacacatagaaataagtcccgatgaaatagttatcaagtttgtaggaaaggacaaagtttcacatgaatttgttgttcataagtctaatagactatataaaccgctattgaaactgacggatgattctagtcccgaagaatttctgttcaacaaactaagtgaacgaaaggtatacgaatgtatcaaacagtttggtattagaatcaaggatctccgaacgtatggagtcaattatacgtttttatataatttttggacaaatgtaaagtccatatctcctcttccgtcaccaaaaaagttaatagcgttaactatcaaacaaactgctgaagtggtaggtcatactccatcaatttcaaaaagagcttatatggcaacgactattttagaaatggtaaaggataaaaattttttagatgtagtatctaaaactacgttcgatgaattcctatctatagtcgtagatcacgttaaatcatctacggatggatgatatagatctttacacaaataattacaagaccgataaatggaaatggataagcgtatgaaatctctcgcaatgacagctttcttcggagagctaaacacattagatattatggcattgataatgtctatatttaaacgccatccaaacaataccattttttcagtggataaggatggtcagtttatgattgatttcgaatacgataattataaggcttctcaatatttggatctgaccctcactccgatatctggagatgaatgcaagactcacgcatcgagtatagccgaacaattggcgtgtgtggatattattaaagaggatattagcgaatatatcaaaactactccccgtcttaaacgatttataaaaaaataccgcaatagatcagatactcgtatcagtcgagatacagaaaagcttaaaatagctctagctaaaggcatagattacgaatatataaaagacgcttgttaataagtaaatgaaaaaaaactagtcgtttataataaaacacaatatggatgccaacatagtatcatcttctactattgcaacgtatatagacgctttagcgaagaatgcttcagaattagaacagaggtctaccgcatacgaaataaataatgaattggaactagtatttattaagccgccattaattactttgacaaatgtagtgaatatctctacgattcaggaatcgtttattcgatttaccgttactaataaggaaggtgttaaaattagaactaagattccattatctaaggtacatggtctagatgtaaaaaatgtacagttagtagatgctatagataacatagtttgggaaaagaaatcattagtgacggaaaatcgtcttcacaaagaatgcttgttgagactatcgacagaggaacgtcatatatttttggattacaagaaatatggatcctctatccgactagaattagtcaatcttattcaagcaaaaacaaaaaactttacgatagactttaagctaaaatattttctaggatccggtgcccagtctaaaagttctttattacacgctattaatcatccaaagtcaaggcctaatacatctctggaaatagaattcacacctagagacaatgaaaaagttccatatgatgaactaataaaggaattgacgactctatcacgtcatatatttatggcttctccagagaatgtaattctttctccgcctattaacgcgcctataaaaacctttatgttgcctaaacaagatatagtaggtttggatctggaaaatctatatgccgtaactaagactgacggaattcctataactatcagagttacatcaaaagggttgtattgttattttacacatcttggttatattattagatatcctgttaagagaataatagattccgaagtagtagtctttggtgaggcagttaaggataagaactggaccgtatatctcattaagctaatagagcctgtgaatgcaatcaatgatagactagaagaaagtaagtatgttgaatctaaactagtggatatttgtgatcggatagtattcaagtcaaagaaatacgaaggtccgtttactacaactagtgaagtcgtcgatatgttatctacatatttaccaaagcaaccagaaggtgttattctgttctattcaaagggacctaaatctaacattgattttaaaattaaaaaggaaaatactatagaccaaactgcaaatgtagtatttaggtacatgtccagtgaaccaattatctttggagaatcgtctatctttgtagagtataagaaatttagcaacgataaaggctttcctaaagaatatggttctggtaagattgtgttatataacggcgttaattatctaaataatatctattgtttggaatatattaatacacataatgaagtgggtattaagtccgtggttgtacctattaagtttatagcagaattcttagttaatggagaaatacttaaacctagaattgataaaaccatgaaatatattaactcagaagattattatggaaatcaacataatatcatagtcgaacatttaagagatcaaagcatcaaaataggagatatctttaacgaggataaactatcggatgtgggacatcaatacgccaataatgataaatttagattaaatccagaagttagttattttacgaataaacgaactagaggaccgttgggaattttatcaaactacgtcaagactcttcttatttctatgtattgttccaaaacatttttagacgattccaacaaacgaaaggtattggcgattgattttggaaacggtgcggacctggaaaaatacttttatggagagattgcgttattggtagcgacggatccggatgctgatgctatagctagaggaaatgaaagatacaacaaattaaactctggaattaaaaccaagtactacaaatttgactacattcaggaaactattcgatccgatacatttgtctctagtgtcagagaagtattctattttggaaagtttaatatcatcgactggcagtttgctatccattattcttttcatccgagacattatgctaccgtcatgaataacttatccgaactaactgcttctggaggcaaggtattaatcactaccatggacggagacaaattatcaaaattaacagataaaaagacttttataattcataagaatttacctagtagcgaaaactatatgtctgtagaaaaaatagctgatgatagaatagtggtatataatccatcaacaatgtctactccaatgactgaatacattatcaaaaagaacgatatagtcagagtgtttaacgaatacggatttgttcttgtagataacgttgatttcgctacaattatagaacgaagtaaaaagtttattaatggcgcatctacaatggaagatagaccgtctacaaaaaactttttcgaactaaatagaggagccattaaatgtgaaggtttagatgtcgaagacttacttagttactatgttgtttatgtcttttctaagcggtaaataataatatggtatgggttctgatatccccgttctaaatgcattaaataattccaatagagcgatttttgttcctataggaccttccaactgtggatactctgtattgttaatagatatattaatacttttgtcgggtaacagaggttctacgtcttctaaaaataaaagtttgataacatctggcctgttcataaataaaaacttggcgattctatatatactcttattatcaaatctagccattgtcttatagatgtgagctactgtaggtgtaccatttgattttctttctaatactatatatttctctcgaagaagttcttgcacatcatctgggaataaaatactactgttgagtaaatcagttattttttttatatcgatattgatggacatttttatagttaaggataataagtatcccaaagtcgataacgacgataacgaagtatttatacttttaggaaatcacaatgactttatcagatcaaaattaacaaaattaaaggagcatgtatttttttctgaatatattgtgactccagatacatatggatctttatgcgtcgaattaaatgggtctagttttcagcacggtggtagatatatagaggtggaggaatttatagatgctggaagacaagttagatggtgttctacatccaatcatatatctgaagatatgcacactgataaatttgtcatttatgatatttatacgtttgattcgttcaagaataaacgattggtatttgtacaggtgcctccatcattaggagatgatagctatttgactaatccgttattgtctccgtattatcgtaattcagtagccagacaaatggtcaatgatatgatttttaatcaagattcatttttaaaatatttattagaacatctgattagaagccactatagagtttctaaacatataacaatagttagatacaaggataccgaagaattaaatctaacgagaatatgttataatagagataagtttaaggcgtttgtattcgcttggtttaacggcgtttcggaaaatgaaaaggtactagatacgtataaaaaggtatctaatttgatataatgaattcagtgactgtatcacacgcgccatatactattacttatcacgatgattgggaaccagtaatgagtcaattggtagagttttataacgaagtagccagttggctgctacgagacgagacgtcgcctattcctgataagttctttatacagttgaaacaaccgcttagaaataaacgagtatgtgtgtgtggtatagatccgtatccgaaagatggaactggtgtaccgttcgaatcaccaaattttacaaaaaaatcaattaaggagatagcttcatctatatctagattaaccggagtaattgattataaaggttataaccttaatataatagacggggttataccctggaattattacttaagttgtaaattaggagaaacaaaaagtcacgcgatctactgggataagatttccaagttactgctgcagcatataactaaacacgttagtgttctttattgtttgggtaaaacagatttctcgaatatacgggcaaagttagaatccccggtaactaccatagtcggatatcatccagcggctagagaccgccaattcgagaaagatagatcatttgaaattatcaacgttttactggaattagacaacaaggcacctataaattgggctcaagggtttatttattaatgctttagtgaaattttaacttgtgttctaaatggatgcaactattagaggtaatgatgttatctttgttcttaagactataggtgtcccgtcagcgtgcagacaaaatgaagatccaagatttgtagaagcatttaaatgcgacgagttagaaagatatattgagaataatccagaatgtacactattcgaaagtcttagggatgaggaagcatactctatagtcagaattttcatggatgtagatttagacgcgtgtctagacgaaatagattatttaacggctattcaagattttattatcgaggtgtcaaactgtgtagctagattcgcgtttacagaatgcggtgccattcatgaaaatgtaataaaatccatgagatctaatttttcattgactaagtctacaaatagagataaaacaagttttcatattatctttttagacacgtataccactatggatacattgatagctatgaaacgaacactattagaattaagtagatcatctgaaaatccactaaccagatcgatagacactgccgtatataggagaaaaacaactcttcgggttgtaggtactaggaaaaatccaaattgcgacactattcatgtaatgcaaccaccgcatgataatatagaagattacctattcacttacgtggatatgaacaacaatagttattacttttctctacaacgacgattggaggatttagttcctgataagttatgggaaccagggtttatttcattcgaagacgctataaaaagagtttcaaaaatattcattaattctataataaactttaatgatctcgatgaaaataattttacaacggtaccactggtcatagattacgtaacaccttgtgcattatgtaaaaaacgatcgcataaacatccgcatcaactatcgttggaaaatggtgctattagaatttacaaaactggtaatccacatagttgtaaagttaaaattgttccgttggatggtaataaactgtttaatattgcacaaagaattttagacactaactctgttttattaaccgaacgaggagaccatatagtttggattaataattcatggaaatttaacagcgaagaacccttgataacaaaactaattctgtcaataagacatcaactacctaaggaatattcaagcgaattactctgtccgaggaaacgaaagactgtagaagctaacatacgagacatgttaatagattcagtggagaccgatacctatccggataaacttccgtttaaaaatggtgtattggacctggtagacggaatgttttactctggagatgatgctaaaaaatatacgtgtactgtatcaaccggatttaaatttgacgatacaaagttcgtcgaagacagtccagaaatggaagagttaatgaatatcattaacgatatccaaccattaacggatgaaaataagaaaaatagagagttgtacgaaaaaactttatctagttgtttatgcggtgctaccaaaggatgtttaacattcttttttggagaaactgcaactggaaagtcgacaaccaaacgtttgttaaagtctgctatcggtgacctgtttgttgagacgggtcaaacaattttaacagatgtattggataaaggacctaatccatttatcgctaacatgcatttgaaaagatctgtattctgtagcgaactacctgattttgcctgtagtggatcaaagaaaattagatctgacaatattaaaaagttgacagaaccttgtgtcattggaagaccgtgtttctccaataaaattaataatagaaaccatgcgacaatcattatcgatactaattacaaacctgtctttgataggatagataacgcattaatgagaagaattgccgtcgtgcgattcagaacacacttttctcaaccttctggtagagaggctgctgaaaataatgacgcgtacgataaagtcaaactattagacgaggggttagatggtaaaatacaaaataatagatatagattcgcatttctatacttgttggtgaaatggtacaaaaaatatcatgttcctattatgaaactatatcctacaccggaagagattccggactttgcattctatctcaaaataggtactctgttagtatctagctctgtaaagcatattccattaatgacggacctctccaaaaagggatatatattgtacgataatgtggttactcttccgttgactactttccaacagaaaatatccaagtattttaattctagactatttggacacgatatagagagcttcatcaatagacataagaaatttgccaatgttagtgatgaatatctgcaatatatattcatagaggatatttcatctccgtaaatatatgctcatatatttatagaagatatcacatatctaaatgaataccggaatcatagatttatttgataatcatgttgatagtataccaactatattacctcatcagttagctactctagattatctagttagaactatcatagatgagaacagaagcgtgttattgttccatattatgggatcaggtaaaacaataatcgctttgttgttcgccttggtagcttccagatttaaaaaggtttacattctagtgcctaatattaacattttgaaaatttttaattataatatgggtgtagctatgaacttgtttaatgacgaattcatagctgagaatatctttattcattccacaacaagtttttattctcttaattataacgataacgtcattaattataacggattatctcgctacaataactctatttttatcgttgatgaggcacataatatctttgggaataatactggagaacttatgaccgtgataaaaaataaaaacaagattccttttttactattgtctggatctcccattactaacacacctaatactctgggtcatattatagatttaatgtccgaagagacgatagattttggtgaaattattagtcgtggtaagaaagtaattcagacacttcttaacgaacgaggtgtgaatgtacttaaggatttgcttaaaggaagaatatcatattacgaaatgcctgataaagatctaccaacgataagatatcacggacgtaagtttctagatactagagtagtatattgtcacatgtctaaacttcaagagagagattatatgattactagacgacagctatgttatcatgaaatgtttgataaaaatatgtataacgtgtcaatggcagtattgggacaacttaatctgatgaataatttagatactttatttcaggaacaggataaggaattgtacccaaatctgaaaataaataatggcgtgttatacggagaagaattggtaacgttaaacattagttccaaatttaaatactttattaatcggatacagacactcaacggaaaacattttatatacttttctaattctacatatggcggattggtaattaaatatatcatgctcagtaatggatattctgaatataatggttctcagggaactaatccacatatgataaacggcaaaccaaaaacatttgctatcgttactagtaaaatgaaatcgtctttagaggatctattagatgtgtataattctcctgaaaacgatgatggcagtcaattgatgtttttgttttcgtcaaacattatgtccgaatcctatactctgaaagaggtaaggcatatttggtttatgactatcccagatactttttctcaatacaaccaaattcttggacgatctattagaaaattctcttacgccgatatttctgaaccagttaatgtatatcttttagccgccgtatattccgatttcaatgacgaagtgacgtcattaaacgattacacacaggatgaattaattaatgttttaccatttgacatcaaaaagctgttgtatctaaaatttaagactaaagaaacgaatagaatatactctattcttcaagagatgtctgaaacgtattctcttccaccacatccatcaattgtaaaagttttattgggagaattggtcagacaatttttttataataattctcgtattaagtataacgataccaagttacttaaaatggttacatcagttataaaaaataaagaagacgctaggaattacatagatgatattgtaaacggtcacttctttgtatcgaataaagtatttgataaatctcttttatacaaatacgaaaacgatattattacagtaccgtttagactttcctacgaaccatttgtttggggagttaactttcgtaaagaatataacgtggtatcttctccataaaactgatgagatatataaagaaataaatgtcgagctttgttaccaatggataccttccagttacattggagccacacgagctgacgttagacataaaaactaatattaggaatgccgtatataagacgtatctccatagagaaattagtggtaaaatggccaagaaaatagaaattcgtgaagacgtggaattacctctcggcgaaatagttaataattctgtagttataaacgttccgtgtgtaataacctacgcgtattatcacgttggggatatagtcagaggaacattaaacatcgaagatgaatcaaatgtaactattcaatgtggagatttaatctgtaaactaagtagagattcgggtactgtatcatttagcgattcaaagtactgcttttttcgaaatggtaatgcgtatgacaatggcagcgaagtcactgccgttctaatggaggctcaacaaggtatcgaatctagttttgtttttctcgcgaatatcgttgactcataaaaaagagaatagcggtaagtataaacacgaatactatggcaataattgcgaatgttttattcccttcgatatatttttgataatatgaaaaacatgtctctctcaaatcggacaaccatctcataaaatagttctcgcgcgctggagaggtagttgctgctcgtataatctccccagaataatatacttgcgtgtcgtcgttcaatttatacggatttctatagttctctgttatataatgcggttttccatcatgattagacgacgacaatagtgttctaaatttagatagttgatcagaatgaatgtttattggcgttggaaaaattatccatacagcgtctgcagagtggttgatagttgttcctagatatgtaaaataatccaacttactaggcagcaaattgtctagataaaatactgaatcaaacggtgcagacgtattggtggatctaatggaatccaattgattaactatcttttgaaaatatacatttttatgatccgatacttgtaagaatatagaaataatgataagtccatcatcgtgtttttttgcctcttcataagaactatattttttcttattccaatgaacaagattaatctctccagagtatttgtacacatctatcaagtgattggatccataatcgtcttcctttccccaatatatacgtagtgatgataacacatattcattggggagaaaccctccacttatatatcctcctttaaaattaatccttactagttttccagtgttctggatagtggttggtttcgactcattataatgtatgtctaacggcttcaatcgcgcgttagaaattgcttttttagtttctatattaataggagatagttgttgcggcatagtaaaaatgaaatgataactgtttaaaaatagctcttagtatgggaattacaatggatgaggaagtgatatttgaaactcctagagaattaatatctattaaacgaataaaagatattccaagatcaaaagacacgcatgtgtttgctgcgtgtataacaagtgacggatatccgttaataggagctagaagaacttcattcgcattccaagcgatattatctcaacaaaattcagattctatctttagagtatccactaaactattacggtttatgtactacaatgaactaagagaaatctttagacggttgagaaaaggttctatcaacgatatcgatcctcactttgaagagttaatattattgggtggtaaactagataaaaaggaatctattaaagattgtttaagaagagaattaaaagaggaaagtgatgaacgtataacagtaaaagaatttggaaatgtaattctaaaacttacaacacgggataaattatttaataaagtatatataagttattgcatggcgtgttttattaatcaatcgttggaggatttatcgcatactagtatttacaatgtagaaattagaaagattaaatcattaaatgattgtattaacgacgataaatacgaatatctgtcttatatttataatatgctagttaatagtaaatgaacttttacagatctagtataattagtcagattattaagtataatagacgactagctaagtctattatttgcgaggatgactctcaaattattacactcacggcattcgttaaccaatgcctatggtgtcataaacgagtatccgtgtccgctattttattaactactgataacaaaatattagtatgtaacagacgagatagttttctctattctgaaataattagaactagaaacatgtctagaaagaaacgattatttctgaattattccaattatttgtccaaacaggaaagaagtatactatcgtcatttttttctctagatccagctactactgataatgatagaatagatgctatttatccgggtggcatacccaaaaggggtgagaatgttccagagtgtttatccagggaaattaaagaagaagttaatatagacaattcttttgtattcatagacactcggttttttattcatggcatcatagaagataccattattaataaattttttgaggtaatcttctttgtcggaagaatatctttaacgagtgatcaaatcattgatacatttaaaagtaatcatgaaatcaaggatctaatatttttagatccgaattcaggtaatggactccaatacgaaattgcaaaatatgctctagatactgcaaaactcaaatgttatggccatagaggatgttattacgaatcattaaaaaaattaactgaggatgattgattagaaaatataaattaatttaccatcgtgtatttttataacgggattgtccggcatatcatgtagatagttaccgtctacatcgtatactcgaccatctacgcctttaaatcctctatttattgacattaatctattagaattggaataccaaatattagtaccctcaattagtttattggtaatattttttttagacgatagatcgatggctcttgaaaccaaggttttccaaccggactcattgtcgatcggtgagaagtctttttcattagcatgaatccattctaatgatgtatgtttaaacactctaaacaattggacaaattcttttgatttgctttgaatgatttcaaataggtcttcgtctacagtaggcataccattagataatctagccattataaagtgcacgtttacatatctacgttctggaggagtaagaacgtgactattgagacgaatggctcttcctactatctgacgaagagacgcctcgttccatgtcatatctaaaatgaagatatcattaattgagaaaaaactaataccctcgcctccactagaagagaatacgcatgttttaatgcattctccgttagtgtttgattcttggttaaactcagccaccgccttgattctagtatcttttgttctagatgagaactctatattagagataccaaagactttgaaatatagtaataagatttctattcctgactgattaacaaatggttcaaagactagacatttaccatgggatgctaatattcccaaacatacatctataaatttgacgcttttctcttttaattcagtaaatagagagatatcagccgcactagcatcccctttcaatagttctccctttttaaaggtatctaatgcggatttagaaaactctctatctcttaatgaatttttaaaatcattatatagtgttgctatctcttgcgcgtattcgcccggatcacgattttgtctttcaggaaagctatcgaacgtaaacgtagtagccatacgtctcagaattctaaatgatgatatacctgtttttatttcagcgagtttagccttttgataaatttcttcttgctttttcgacatattaacgtatcgcattaatactgttttcttagcgaatgatgcagacccttctacgtcatcaaaaatagaaaactcgttattaactatgtacgaacataggcctcctagtttggagactaattctttctcatcaactagacgtttattctcaaatagcgattggtgttgtaaggatcctggtcgtagtaagttaaccaacatggtgaattcttgcacactattaacgataggtgtagccgataaacaaatcatcttatggttttttaatgcgatggtcttagataaaaaattatatactgaacgagtaggacggatcttaccatcttctttgattaatgatttagaaatgaagttatgacattcatcaataatgacgcatattctactcttggaattaatagttttgatattagtaaaaaatttatttctaaaattttgatcatcgtaattaataaaaatacaatccttcgttatctctggagcgtatctgagtatagtgttcatccaaggatcttctatcaaagcctttttcaccaataagataatagcccaattcgtataaatatccttaagatgtttgagaatatatacagtagtcattgttttaccaacacccgtttcatggaacaataaaagagaatgcatactgtctaatcctaagaaaactcttgctacaaaatgttgataatccttgaggcgtactacgtctgttcccatcatttcaacaggcatattagtagttctgcgcaatgcataatcgatataggccgcgtgtgatttactcatttatgagtgataagtaataactatgttttaaaaatcacagcagtagtttaactagtcttctctgatgtttgttttcgatactttttgaatcagaagtcatactagaataaagcaacgagtgaacgtaatagagagcttcgtatactctattcgaaaactctaagaacttattaatgaattccgtatccactggattgtttaaaatactaaattgaacactgttcacatccttccaagaagaagacttagtgacggacttaacatgagacataaataaatccaaattttttttacaaacatcactagccaccataatggcgctatctttcaaccagctatcgcttacgcattttagcagtctaacatttttaaagagactacaatatattctcatagtatcgattacacctctaccgaataaagttggaagtttaataatacaatatttttcgtttacaaaatcaaataatggtcgaaacacgtcgaaggttaacatcttataatcgctaatgtatagattgttttcagtgagatgattattagatttaatagcatctcgttcacgtttgaacagtttattgtgtgcgctgaggtcggcaactacggcgtccgctttagtactcctcccataatactttacgctattaatctttaaaatttcatagactttatctagatcgctttctggtaacatgatatcatgtgtaaaaagttttaacatgtcggtcggcattctatttagatcattaactctagaaatctgaagaaagtaattagctccgtattccagactaggtaatgggcttttacctaaagacaagttaagttctggcaatgtttcataaaatggaagaaggacatgcgttccctcccggatattttttacaatttcatccatttacaactctatagtttgttttcattattattagttattatctcccataatcttggtaatacttaccccttgatcgtaagataccttatacaggtcattacatacaactaccaattgtttttgtacataatagattggatggttgacatccatggtggaataaactactcgaacagatagtttatctttccccctagatacattggccgtaatagttgtcggcctaaagaatatctttggtgtaaagttaaaagttagggttcttgttccattattgctttttgtcagtagttcattataaattctcgagatgggtccgttctctgaatatagaacatcatttccaaatctaacttctagtctagaaataatatcggtcttattcttaaaatctattcccttgatgaagggatcgttaatgaacaaatccttggcctttgattcggctgatctattatctccgttatagacgttacgttgactagtccaaagacttacaggaatagatgtatcgatgatgttgatactatgtgatatgtgagcaaagattgttctcttagtggcatcactatatgttccagtaatggcggaaaactttttagaaatgttatatataaaagaattttttcgtgttccaaacattagcagattagtatgaagataaacactcatattatcaggaacattatcaatttttacatacacatcagcatcttgaatagaaacgataccatcttctggaacctcaacaatctcggcagactccggataaccagtcggtgggccatcactaacaataactagatcatccaacaatctactcacatatgcatctatataatctttttcatcttgtgagtaccctggatacgaaataaatttattatccgtatttccataataaggtttagtataaacagagagcgatgttgccgcatgaacttcagttacagtcgccgttggttggtttatttgacctattactctcctaggtttctctataaacgatggtttaatttgtacattcttaaccatatatccaataaagctcaattcaggaacataaacaaattctttgttgaacgtttcaaagtcgaacgaagagtcacgaataacgatatcggatactggattgaaggttaccgttacggtaatttttgaatcggatagtttaagactgctgaatgtatcttccacatcaaacggagttttaatataaacgtatactgtagatggttctttaatagtgtcattaggagttaggccaatagaaatatcattaagttcactagaatatccagagtgtttcaaagcaattgtattattgatacaattattatataattcttcgccctcaatttcccaaataacaccgttacacgaagagatagatacgtgattaatacatttatatccaacatatggtacgtaaccgaatcttcccatacctttaacttctggaagttccaaactcagaaccaaatgattaagcgcagtaatatactgatccctaatttcgaagctagcgatagcctgattgtctggaccatcgtttgtcataactccggatagagaaatatattgcggcatatacaaagttggaatttgactatcgactgcgaagacattagaccgtttaatagagtcatccccaccgatcaaagaattaatgatagtattattcattttctatttaaaatggaaaaagcttacaataaactccgtagagaaatatctataatttgtgagttttccttaaagtaacagcttccgtaaacgccgtctttatctcttagtaggtttattgtatttatgaccttttccttatcttcatagaatactaaaggcaacaaagaaatttttggttcttctctaagagctacgtgagacttaaccatagaagccaacgaatccctacatattttagaacagaaatacccaacttcaccacccttgaatgtctcaatactaataggtctaaaaaccaaatcttgattacaaaaccaacacttatcaattacactatttgtcttaatagacacatctgccatagatttataatactttggtagtatacaagcgagtgcttcttctttagcgggcttaaagactgctttaggtgctgaaataaccacatctggaaggcttactcgcttagccatttaattacggaactatttttttatacttctaatgagcaagtagaaaacctctcatctacaaaaacatactcgtgtccataatcctctaccatagttacacgttttttagatctcatatgtgctaaaaagttttcccatactaattggttactattatttttcgtataatttttaacagtttgaggttttagatttttagttacagaagtgatatcgaatattttatccaaaaagaatgaataattaattgtcttagaaggagtgttttcttggcaaaagaataccaagtgcttaaatatttctactacttcattaatcttttctgtactcagattcagtttctcatcttttacttgattgattatttcaaagactaacttataatcctttttatttattctctcgttagccttaagaaaactagatacaaaatttgcatctacatcatccgtggatatttgatttttttccatgatatccaagagttccgagataatttctccagaacattgatgagacaataatctccgcaatacatttctcaaatgaataagtttattagacacatggaagtttgactttttttgtacctttgtacatttttgaaatacagactcgcaaaaaatacaatattcatatccttgttcagatactataccgttgtgtctacaaccgctacataatcgtagattcatgttaacactctacgtatctcgtcgtccaatattttatataaaaacattttatttctagacgttgccagaaaatcctgtaatatttttagttttttgggctgtgaataaagtatcgccctaatatggttaccgtcctccgccaatatagtagttaaattatccgcacatgcagaagaacaccgcttaggcggattcagtacaatgttatatttttcgtaccaactcatttaaatatcataatctaaaatagttctgtaatatgtctagcgctaatatattgatcataatcctgtgcataaattaagatacaacaatgtctcgaaatcatcgacatggcttcttccatagttagaagatcgtcgtcaaagttagcaacgtgattcatcaacatttgctgttttgaggcagcaaatactgaaccgtcgccattcaaccattcataaaaaccatcgtctgaatccattgataatttcttgtactggtttttgagagctcgcatcaatctagcatttctagctcccggattgaaaacagaaagaggatcgtacatccagggtccattttctgtaaatagaatcgtataatgtcccttcaagaagatatcagacgatccacaatcaaagaattggtctccgagtttgtaacaaactgcggactttaacctatacatgataccgtttagcatgatttctggtgatacgtcaatcggagtatcatctattagagatctaaagccggtgtaacattctccaccaaacatattcttattctgacgtcgttctacataaaacatcattgctccattaacgataacaggggaatgaacagcactacccatcacattagttcccaatggatcaatgtgtgtaactccagaacatcttccatatcctatgttaggaggagcgaacaccactcttccactattgccatcgaatgccatagaataaatatccttggaattgatagaaatcggactgtcggatgttgtgatcatcttcataggattaacaactatgtatggtgccgcctgaagtttcatatcgtaactgatgccgtttataggtctagccacagaaaccaacgtaggtctaaatccaactatagacaaaatagaagccaatatctgttcttcatctgtcataacttgagagcatccagtatgaataatcttcattagatggggatctaccgcatcatcatcgttacaataaaaaattcccattctaatgttcataattgcttttctaatcatggtatgcatgtttgctctctgaatctctgtggaaattagatctgatacacctgtaatcactatcggattatcctccgtaagacgattaaccaacaacatataattataagactttacttttctaaattcataaagttgctggattaggctataggtgtctccatgtacatacgcgttctcgagcgcaggaagtttaataccgaatagtgccatcagaataggatgaatatagtaattagtttctggttttctataaataaaagacaaatcttgtgaactagacatatcggtaaaatgcatggattggaatcgtgtagtcgacagaagaatatgatgattagatggagagtatattttatctaactctttgagttggtcaccgattctaggactagctcgagaatgaataagtactaaaggatgagtacatttcacagaaacactagcattgttcaatgtgctctttacatgggtaaggagttgaaatagctcgtttctatttgttctgacaatatttagtttattcataatgttaagcatatcctgaatagtaaagttagatgtgtcatacttgttagtagttagatatttagcaattgcattcccatcatttctcaatctcgtactccaatcatgcgtggatgctacttcgtcgatggaaaccatacaatcctttttgataggctgttgagattgattatttcctgcacgtttaggtttggtacgttgatttctagcccctgcggatataaagtcatcgtctacaattttggataatgaattgcatacactacaagacaaagatttatcagaagtgtgaatatgatcttcatctaccaaagaaagagtttgattagtataactagattttagtcctgcgttagatgttaaaaaaacatcgctattgaccacggcttccattatttatattcgtagtttttactcgaaagcgtgattttaatattcaatcttattacttttggaatcgttcaaaacctttgactaattgtagaatttgatctattgccctacgcgtatactcccttgcatcatatacgttcgtcaccagatcgtttgtttcggcctgaagttggtgcatatctctttcaacattcgacatgagatccttaagggccatatcgtctagattttgttgagatgctgctcctggatttggattttgttgtgctgttgtacatactgtaccaccagtaggtgtaggagtacatacagtggccacaataggaggttgaggaggtgtaaccgttggagtagtacaagaaatacttccatccgattgttgtgtacatgtagttgttggtaacgtctgagaaggttgggtagatggcggcgtcgtcgtcttttgatctttattaaatttagagataatatcctgaacagcattgctcggcgtcaacgctggaaggagtgaactcgccggcgcatcagtatctgcagacagccaatcaaaaagattagacatatcagatgatgtattagtttgttgtcgtggttttggtgtaggagccggtgtagctgttggaaccggctgtggagttatatgaatagttggttgtagcggttggataggctgtctgctggcggccatcatattatctctagctagttgttctcgcaactgtctttgataatacgactcttgagactttagtcctatttcaatcgcttcatcctttttcgtatccggatccttttcttcagaataatagattgacgactttggtgtagaggattctgccagcccctgtgagaacttgttaaagaagtccatttaaggctttaaaattgaattgcgattataagattaaatggcagacacagacgatattatcgactatgaatccgatgatctcaccgaatacgaggatgatgaagaagaggaagaagatggagagtcactagaaactagtgatatagatcccaaatcttcttataagattgtagaatcagcatccactcatatagaagatgcgcattccaatcttaaacatatagggaatcatatatctgctcttaaacgacgctatactagacgtataagtctatttgaaatagcgggtataatagcagaaagctataacttgcttcaacgaggaagattacctctagtttcagaattttctgacgaaacgatgaagcaaaatatgctacatgtaattatacaagagatagaggagggttcttgtcctatagtcatcgaaaagaacggagaattgttgtcggtaaacgattttgacaaagatggtctaaaattccatctagactatattatcaaaatttggaaacttcaaaaacgatattagaatttatacgaatatcgttctctaaatgtcacaatcaagtctcgcatgttcagcaatttattgtcgtactttatatcgtgttcattaacgatatcttgcaaaatagtaatgattctatcttccttcgatagatattcttcagagattattgtcttatattctttcttgttatcagatatgaatttgataagactttgaacattattgatacccgtctgtttaattttttctacagatattttagttttggcagattctatcgtatctgtcaatagacatccaacatcgacattcgacgtcaattgtctataaatcaacgtataaattttagaaataacattagcgaattgttgtgcattgatgtcgttattctgaaacagtatgattttaggtagcattttcttaacaaagagaacgtatttattgttactcagttgaacagatgatatatccagattactaacgcatctgattccatataccaaactttcagaagaaatggtgtacaattgtttgtattcattcaatgtctctttttcagaaattagtttagagtcgaatactgcaataattttcaagagatagttttcatcagataagattttatttagtgtagatatgataaaactattgttttgttggagaacttgatacgccgcgttctctgtagtcgacgctctcaaatgggaaacaatctccattatttttttggaatcggatacaatatcttcggtatcttgacgcaatctagtatacatagagttaagagaaattagagtttgtacattaagcaacatgtctctaaatgtggctgcaaacttttccttttccacatcatctagtttattatataccgatttcacaacggcaccagatttaaggaaccagaatgaaaaactctgataactacaatatttcatcatagttacgattttatcatcttctatagttggtgtaatagcgcatacctttttctccaagactggaaccaacgtcataaaaatgtttaaatcaaaatccatatcaacatctgatgcgctaagaccagtctcgcgttcaagattatctttactaatggtgacgaactcatcgtatagaactctaagtttgtccattatttatttacagatttagttgtttaatttatttgtgctcttccagagttgggatagtatttttctaacgtcggtattatattattaggatctacgttcatatgtatcataatattaatcatccacgttttgataaatctatctttagcttctgaaataacgtatttaaacaaaggagaaaaatatttagctacggcatcagacgcaataacattttttgtaaatgtaacgtatttagacgacagatcttcgttaaaaagttttccatctatgtagaatccatcggttgttaacaccattcccgcgtcagattgaataggagtttgaatagtttgttttggaaatagatccttcaataacttatagttgggtgggaaaaaatcgattttatcactagactctttcttttttactatcattacctcatgaactatttcttgaatgagtatatgtattttctttcctatatcggacgcgttcattggaaaatataccatgtcgttaactataagaatatttttatcctcgtttacaaactgaataatatcagatgtagttcgtaaacgaactatatcatcaccagcacaacatctaactatatgatatccactagtttcctttagtcgtttattatcttgttccatattagcagtcattccatcatttaagaaggcgtcaaagataatagggagaaatgacattttggattctgttacaactttaccaaaattaaggatatacggacttactatctttttctcaacgtcgatttgatgaacacacgatgaaaatgtacttcgatgagattgatcatgtagaaaacaacaagggatacaatatttccacatatcatgaaatatattaagaaatcccaccttattatatttccccaaaggatccatgcatgtaaacattatgccgttatcattaataaagacttctttctcatcggatctgtaaaagttgttactgatttttttcattccaggatctagataattaataatgatgggttttctattcttattctttgtattttggcatatcctagaccagtaaacagtttccactttggtaaaatcagcagacttttgaacgctattaaacatggcattaatggcaataactaaaaatgtaaaatatttttctatgttaggaatatggtttttcactttaatagatatatggtttttggccaaaatgatagatatttttttatccgaggatagtaaaatattattagtcgccgtctctataaaaatgaagctagtctcgatatccaattttattctagaattgataggagtcgccaaatgtaccttatacgttatatctcccttgatgcgttccatttgtgtatctatatcggacacaagatctgtaaatagttttacgttattaatcatcacggtatcgccgtcgctagataacgctaatgtaccatccaagtcccaaatggagagatttaactgttcatcgtttagaataaaatgattaccggtcatattaataaagtgttcatcgtatctagataacaacgacttataattaatgtccaagtcttgaactcgctgaatgatcttttttaacccagttagttttagattggtacgaaatatattgttaaactttgattctacagtaatgtccaaatctagttgtggaaatacttccatcaacattgtttcaaacttgataatattattatctacatcttcatacgatccaaattccggaatagatgtatcgcacgctctggccacccagataaccaaaaagtcacacgctccaggatatacattgtataaaaagctatcgttttttagtagtgtttttttctgagtatatacgaagggattaaaaatagtattatcaacgtaactatattccaaattattcttatgagaatagataataatatcgtccttaatatctaacaaatttcctaaatatccctttaattgagtcattcgaagcgtcaatagaatatgtctcttaactatttccggctgttgtatatttaaatgacttcgtaaaaaataatatatgggcgacttctcatctatgtaatcatatggagtgagatatagggctcgttctacctcctgccccttacccacctgtaataccaattgcggacttactatatatcgcatatttatatcgtggggtaaagtgaaaatctactaccgatgatgtaagtcttacaatgttcgaaccagtaccagatcttaatttggaggcctccgtagaactaggggaggtaaatatagatcaaacaacacctatgataaaggaaaatagcggttttatatcccgtagtagacgtctattcgcccatagatctaaggatgatgagagaaaactagcactacgattctttttacaaagactttattttttagatcatagagagattcattatttgttcagatgcgttgacgctgtaaaagacgtcactattaccaaaaaaaataacattatcgtggcgccttatatagcacttttaactatcgcatcaaaaggatgcaaacttacagaaacaatgattgaagcattctttccagaactatataatgaacatagtaagaaatttaaattcaactctcaagtatccatcatccaagaaaaactcggataccagtttggaaactatcacgtttatgattttgaaccgtattactctacagtagctctggctattcgagatgaacattcatctggcatttttaatatccgtcaagagagttatctggtaagttcattatctgaaataacatatagattttatctaattaatctaaaatctgatcttgttcaatggagtgctagtacgggcgctgtaattaatcaaatggtaaatactgtattgattacagtgtatgaaaagttacaactggtcatagaaaatgattcacaatttacatgttcattggctgtggaatcaaaacttccaataaaattacttaaagatagaaatgaattatttacaaaattcatcaacgagttaaaaaagaccagttcattcaagataagcaaacgcgataaggatacgctactaaaatattttacttaggactggagttagaatttatagacgactcatttcgtttatcattattagtattcttcttgttatcttgttcagaaatatacagcaatgctatgcctaatactaaatacattatcatgcttgcaatggctctaacaacgacgaaccaaaatgaatttggtcgtagcttttgttcacaaaaatacataaagaaatgtctacataaatctatggcgccattggctacttgaaatagcgccagtcctcctacagattttaatatagctgtataacatgacatttattcatcatcaaaagagacagagtcaccatctgtcatatttagattttttttcatgtgttcaaagtatcctctactcatttcattataatagtttatcatacttagaattttaggacggatcaatgagtaagacttgactagatcgtcagtagtaatttgtgcatcgtctattctgcatccgcttcgtcgaataatgtatagcatcgctttgagattctccatagctatcaagtctttatacaatgacatggaaatatctgtgaatactttatacttctccaacatcgatgccttaacatcatcgcctactttagcattgaaaatacgttctattgtgtagatggatgtagcaagatttttaaacaacaatgccattttacacgatgattgcctcaagtctccaatcgtttgtttagaacgattagctacagagtccaatgcttggctgactagcatattattatctttagaaattgtattcttcaatgaggcgtttatcatatctgtgatttcgttagtcatattacagtctgactgggttgtaatgttatccaacatatcacctatggatacggtacacgtaccagcatttgtaataatcctatctaagatgttgtatggcattgcgcagaaaatatcttctcctgtaatatttccactctcgataaatctactcagattattcttaaatgccttattctctggagaaaagatatcagtgtccatcatttcattaatagtatacgcagaaaagataccacgagtatcaattctatccaagatacttatcggttccgagtcacagataatggtttcctctccttcgggagatcctgcatagaaatatctaggacaatagtttctatactgtctgtaactctgataatctctaaagtcactaactgataccatgaaattgagaagatcaaacgctgaagtaattaatttttctgcctcgtttttactacaactagttttcatcaatgtagtgacgatgtattgtttagttactcttggtctaatactgatgatagagatattattacttcccataatggatcttctagtagtcaccttaaagcccattgatgcaaatagcagatagataaagtcttggtatgactcctttctaatatagtacggactacctttgtcacccaactttatacccacataagccataacaacctctttaatagccgtttcatgaggtttatcagccatgagcctgagtagttggaagaatctcatgaatcctgtctcagaaagtcctatatgcatgatagatttatctttcctgggaaactctcgtatagtcatagatgaaatactcttcaaagtttctgaaataagattagtaacagtcttacctccgactactctaggtaacaaacaaactctaataggtgttttctctgcggagataatatcagaaaggatagagcaataagtagtattattgtgattataaagaccgaatacataacaggtagaatttataaacatcatgtcctgaaggtttttagacttgtattcctcgtaatccataccgtcccaaaacatggatttggtaactttgatagccgtagatctttgttccttcgccaacaggttaaagaaattaataaagaatttgtggtttctacctatgtctacaaattgcacgtttggaagcgccacggttacattcactgcagcattttgaggatcgcgagtatgaagtacgatgttattgtttactggtatatctggaaagaattctaccagtctaggaataagagattgatatcgcatagaaatacaaaagttcataatctcatcatctaagagcattttgttaccattgtaataaatatccactctgtcatatgtataaatgaagtactgttcaaacatgatgagatgtttatatgttggcatagtagtgagatctacgtttggtaatggcaatgtattaagattaactccataatgtctagcagcatctgcgatgttataagcgttgtcaaagcggggtcgatcttgtgctgttatatattgtctaacacctataagattatcaaaatcttgtctgcttaatacaccgttaacaatttttgccttgaattcttttattggtgcattaataacatccttatagaggatgttaaacaaataagtgttatcaaagttaagatctggatatttcttttctgctagaacatccattgagtcggagccatctggtttaatataaccaccgataaatctagctctgtattctgtatccgtcaatctaatattaagaaggtgttgagtgaaaggtggaagatcgtaaaagctgtgagtattaatgataggattagtttccgaactaatgttaattggggtattaataatatctatatttccagcgttaagtgtaacattaaacagttttaattcacgtgacgtggtatcaattaaataattaatgcccaatttggatatagcagcctgaagctcatcttgtttagttacggatcctaatgagttattaagcaatatatcgaacggatgaacgaaggttgttttaagttggtcacatactttgtaatctagacatagatgcggaagaacggtagaaactatacgaaataaatattcagagtcctctaattgatcaagagtaactattgacttaataggcatcatttatttagtattaaatgacgaccgtaccagtgacggatatacaaaacgatttaattacagagttttcagaagataattatccatctaacaaaaattatgaaataactcttcgtcaaatgtctattctaactcacgttaacaacgtggtagatagagaacataatgccgccgtagtgtcatctccagaggaaatatcctcacaacttaatgaagatctatttccagatgatgattctccggccactattatcgaacgagtacaacctcatactactattattgacgatactccacctcctacgtttcgtagagagttattgatatcggaacaacgtcaacaacgagaaaaaagatttaatattacagtatcgaaaaatgctgaagcaataatggaatctagatctatgatatcttctatgccaacacaaacaccatccttgggagtagtttatgataaagataaaagaattcagatgttggaggatgaagtggttaatcttagaaatcaacgatctaatacaaaatcatctgataatttagataattttaccagaatactatttggtaagactccgtataaatcaacagaagttaataagcgtatagccatcgttaattatgcaaatttgaacgggtctcccttatcagtcgaggacttggatgtttgttcagaggatgaaatagatagaatctataaaacgattaaacaatatcacgaaagtagaaaacgaaaaattatcgtcactaacgtgattattattgtcataaatattatcgagcaagcattgctaaaactcggatttgaagaaatcaaaggactgagtaccgatatcacttcagaaattatcgatgtggagatcggagatgactgcgatgctgtagcatcaaaactaggaatcggtaacagtccggttcttaatattgtattgtttatactcaagatattcgttaaacgaattaaaattatttaatttaatacattcccatatccagacaacaatcgtctggattaatctgttcctgtcgtctcataccggacgacatattaatctttttattagtaggcatctttttagatggtttctttttcccagcattaactgagtcgatacctagaagatcgtgattgatctctccgaccattccacgaacttctaattggccgtctctgacggtaccataaactattttaccagcattagtaacagcttggacaatctgaccatccatcgcattgtacgatgtagtagtaactgttgttctacgtctaggagcaccagaagtatttttggagcccttggatgttgatgtagaagaagacgaggattttgattttggtttacatgtaatacattttgtatcacatgcgccggcagtcacatctgtttgagaattaagattattgttgcctcctttgacggctgcatctccaccgatttgcgctagtagatttttaagctgtggtgtaatcttattaactgtttcgatataatcatcgtaactgcttctaacggctaaattttttttatccgccatttagaagctaaaaatatttttatttatgcagaagatttaactagattatacaatgaactaatatgatccttttccagattatttacaaacttggtattttttggttctggaggaggcgaatttaaattcggacttggatttggattttgtgggttcttgatcttattatacagcgcatataggatggcgacggtaactgctacgcaaataccgatcaacaaaagaataccaatcatttattgacaataacttcactattgatcaagtatgcaatatatcatcttttcactaaataagtagtaataatgattcaacaatgtcgagatatatggacgataataatttagttcatggaaatatcgctatgattggtatgaatgactccgctaactctgtggggcgcgcagtgctttccccacatagaataaattagcattccgactgtgataataataccaagtataaacgccataatactcaatactttccatgtacgagtgggactggtagacttactaaagtcaataaaggcgaagatacacgaaagaatcaaaagaatgattccagcgattagcacgccggaaaaataatttccaatcataagcatcatatccatttaactaataaaaattttaaatcgccgaatgaacaaagtggaatataaaccatataaaaacaatagtttgtactgcaaaaataatatctatttttgttttcgaagatatggtaaaattaaatagtagtacacagcatgttataactaacagcagcaacggctcgtaattacttatcatttactagacgaaaaggtggtgggatattttcttgctcaaataatacgaatatatcacccatccattttatgcgatgtttatatactctaatctttaatagatctatagacgacgggtttaccaacaatatagattttatcgattcatctaatttaaacccttccttaaacgtgaatgatctattatctggcataacgatgactctacccgatgaatcggacaatgtactgggccatgtagaataaattatcaacgaattatcgtctacgaacatttatatcatttgttttaattttagtacgcgaataaatagatataaaatagaaaataacagatattacaaccaatgttatggccgcgcccaaccaggtaggcagttttattttatcttttactacaggttctcctggatgtacgtcaccaacggcggacgtagttctagtacaattagacgtaagttccgcttgggaattttttaacgctaaagagttaacgttaatcgtgcacccaacgtatttacatctagttctttgaacatcttgattataatataaccattttctatctctagattcgtcggtgcactcatgtaaccaacataccctaggtcctaaatatttatctccggaattagattttggataattcgcgcaccaacaatttctatttcctttatgatcgttacaaaagacgtataatgccgtatccccaaaagtaaaataatcaggacgaataattctaataaactcagaacaatatctcgcatccatatgtttggagcaaatatcggaataagtagacatagccggtttccgttttgcacgtaaccattctaaacaattggggtttccaggatcgtttctacaaaatccagtcatgaaatcatcacaatgttctgtcttgtaattattattaaatatttttggacagtgtttggtatttgtcttagaacaacattttgccacgctatcactatcgcccaggagataatccttttttataaaatgacatcgttgcccggatgctatataatcagtagcgtgttttaaatccttaatatattcaggagttacctcgttctgataatagattaatgatccaggacgaaatttgaaagaactacatggttctccatgaattaatacatattgtttagcaaattcaggaactataaaactactacaatgatctatcgacataccatctatcaaacaaaacttgggtttaatttctcccggagatgtttcataatagtacgtataactttcttctgcaaacttaacagctctattatattcaggataattaaaacctaattccatatatttgtctcgtatatctgctattcctggtgctattttgattctattaagagtaacggctgcccccatttttaataatcgtcagtatttaaactgttaaatgttggtatatcaacatttaccttatttcccgcagtataaggtttgttgcaggtatactgttcaggaatggttacatttatactttttctatagtcctgtctttcgatgttcatcacatatgcaaagaacagaataaacaaaataatgtaagaaataatattaaatatctgtgaattcgtaaatacattgattgccataataattacagcagctacaatacatacaatagacattcccacagtgttgccattacctccacgatacatttgagttactaagcaataggtaataactaagctagtaagaggcaatagaaaagatgagataaatatcatcaatatagagattagaggagggctatatagagccaagacgaacaaaatcaaaccgagtaacgttctaacatcattatttttgaagattcccaaataatcattcattcctccataatcgttttgcatcatacctccatctttaggcataaacgattgctgctgttcctctgtaaataaatctttatcaagcactccagcacccgcagagaagtcgtcaagcatattgtaatatcttaaataactcatttatatattaaaaaatgtcactattaaagatggagtataatctttatgccgaactaaaaaaaatgacttgtggtcaacccctaagtctttttaacgaagacggggatttcgtagaagttgaaccgggatcatcctttaagtttctgatacctaagggattttacgcctctccttccgtaaagacgagtctagtatttgaaacattaacaacgaccgataataaaattactagtatcaatccaacaaatgcgccaaagttatatcctcttcaacgcaaagtcgtatctgaagtagtttctaatatgaggaaaatgatcgaatcaaaacgtcctctatacatcactcttcacttggcgtgtggatttggtaagactattaccacgtgttatcttatggctacacacggtagaaaaaccgtcatttgcgtacccaataaaatgttaatacatcaatggaagacacaggtagaggcagtcggattggaacataagatatccatagatggagtaagtagtctattaaaggaactaaagactcaaagtccggatgtattaatagtagtcagtagacatctgacaaacgatgccttttgtaaatatatcaataagcattatgatttgttcatcttggatgaatcacatacgtataatctgatgaacaatacagcagttacaagatttttagcgtattatcctccgatgatgtgttattttttaactgctacacctagaccatctaacagaatttattgtaacagtattattaatattgccaagttatccgatctaaaaaaaactatctatgcagtagatagtttttttgagccatattccacagataatattagacatatgataaaacgattagatggaccatctaataaatatcatatatataccgagaagttattatctgtagacgagcctagaaatcaacttattcttaataccctggtagaagaattcaagtcaggaactattaatcgcattttagttattactaaactacgtgaacatatggtattcttctacaaacgattattagattttttcggatcagaggttgtatttataggagacgcccaaaatagacgtactccagatatggtcaaatcaatcaaggaactaaatagatttatattcgtatccaccttattttattccggtactggtttagatattcctagtttggattctttgttcatttgctcggcagtaatcaacaatatgcaaatagagcaattactagggagggtatgtcgagaaacagaactattagataggacggtatatgtatttcctagcacatccatcaaagaaataaagtacatgataggaaatttcgttcaacgaattattagtctgtctgtagataaactaggatttaaacaaaaaagttatcggaaacatcaagaatccgatcccacttctgtatgtacaacatcctccagagaagaacgtgtattaaatagaatatttaactcgcaaaatcgttaagaagtttaagcgacgatccgcatgctgcgcaggccagtgtattacccctcatagtattaatataatccaatgatacttttgtgatgtcggaaatcttaaccaatttagactgacaggcagaacacgtcatgcaatcatcatcgtcatcgataactgtagtcttgggcttctttttgcggctcttcattccggaacgcacattggtgctatccatttaggtagtaaaaaataagtcagaatatgccctatagcacgatcgtgcaaaacctggtatatcgtctctatctttatcacaatatagtgtatcgacatctttattattattgacctcgtttatcttggaacatggaatgggaacatttttgttatcaacggccacctttgccttaattccagatgttgtaaaattataactaaacagtctatcatcgacacaaatgaaattcttgtttagacgtttgtagtttacgtatgcggctcgttcgcgtctcattttttcagatattgcaggtactataatattaaaaataagaatgaaataacataggattaaaaataaagttatcatgacttctagcgctgatttaactaacttaaaagaattacttagtctgtacaaaagtttgaaattttcagattctgcggctatagaaaagtataattctttggtagaatggggaacatctacttactggaaaataggcgtgcaaaaggtagctaatgtcgagacgtcaatatctgattattatgatgaggtaaaaaataaaccgtttaatattgatccgggctattacattttcttaccggtatattttgggagcgtctttatttattcgaagggtaaaaatatggtagaacttggatctggaaactcttttcaaataccagatgatatgcgaagtgcgtgtaacaaagtattagacagcgataacggaatagactttctgagatttgttttgttaaacaatagatggataatggaagatgctatatcaaaatatcagtctccagttaatatatttaaactagctagtgagtacggattaaacatacccaaatatttagaaattgaaatagaggaagacacattatttgacgacgagttatactctattatagaacgctctttcgatgataaatttccaaaaatatccatatcgtatattaagttgggagaacttaggcggcaagttgtagactttttcaaattctcattcatgtatattgagtccatcaaggtagatcgtataggagataatatttttattcctagcgttataacaaaatcaggaaaaaagatattagtaaaagatgtagaccatttaatacgatccaaggttagagaacatacatttgtaaaagtaaaaaagaaaaacacattttccattttatacgactatgatggaaacggaacagaaactagaggagaagtaataaaacgaattatagacactataggacgagactattatgttaacggaaagtatttctctaaggttggtagtgcaggcttaaagcaattgactaataaattagatattaatgagtgcgcaactgtcgatgagttagttgatgagattaataaatccggaactgtaaaacgaaaaataaaaaaccaatcagcatttgatttaagcagagaatgtttgggatatccagaagcggattttataacgttagttaataacatgcggttcaaaatagaaaattgtaaggttgtaaatttcaatattgaaaatactaattgtttaaataacccgagtattgagactatatatggaaactttaaccagttcgtctcaatctttaatatcgtcaccgatgtcaaaaaaagattattcgagtgaaataatatgcgcctttgatataggtgcaaaaaatcctgccagaactgttttagaagtcaaggataactccgttagggtattggatatatcaaaattagactggagttctgattgggaaaggcacatagctaaagatttgtcacaatatgaatacactacagttcttctagaacgtcagcctagaaggtcgccgtacgtcaaatttatctattttattaaaggctttttatatcatacatcggctgccaaagttatttgcgtctcgcctgtcatgtctggtaattcatatagagatcgaaaaaagagatcggtcgaagcatttcttgattggatggacacattcggattgcgagactccgttccggatagacgcaaattagacgatgtagcggatagtttcaatttggctatgagatacgtattagataaatggaatactaattatacaccttataataggtgtaaatctagaaattacataaaaaaaatgtaataacgttagtaacgccattatggataatctatttacctttctacatgaaatagaagatagatatgccagaactatttttaactttcatctaataagttgcgatgaaataggagatatatatggtcttatgaaagaacgcatttcctcagaggatatgtttgataatatagtgtataataaagatatacatcatgccattaagaaactagtgtattgcgacatccaacttactaaacacattattaatcagaatacgtatccggtatttaacgattcttcacaagtgaaatgttgtcattatttcgatataaactcagataatagcaatattagctctcgtacagtagagatatttgagagggaaaagtcatctcttgtatcatatattaaaactaccaataagaagagaaaggtcaattatggggaaataaagaaaactgtacatggaggcactaatgcaaattacttttccggtaaaaagtctgatgagtatctgagcactacagtcaggtccaacattaatcaaccttggatcaaaaccatttctaagagaatgagagtagatatcattaatcactctatagtaacgcgtggaaaaagctctatattacaaactatagaaattatttttactaatagaacatgtgtgaaaatattcaaggattctactatgcacattattctatccaaggacaaggatgaaaaggggtgtatacacatgattgacaaattattctatgtctattataatttatttctgttgttcgaggatatcatccaaaacgagtactttaaagaagtagctaatgttgtaaaccacgtactcacggctacggcattagatgagaaattattcctaattaagaaaatggctgaacacgatgtttatggagttagcaatttcaaaatagggatgtttaacctgacatttattaagtcgttggatcataccgttttcccctctctgttagatgaggatagcaaaataaagttttttaaggggaaaaagctcaatattgtagcattacgatctctggaggattgtataaattacgtgactaaatccgagaatatgatagaaatgatgaaggaaagatcgactattttaaatagcatagatatagaaacggaatcggtagatcgtctaaaagaattgcttctaaaatgaaaaaaaaacactaattcagaaatggatcaacgactcggatataagtttttggtgcctgatcctaaagccggagttttttatagaccgttacatttccaatatgtatcgtattctaattttatattgcatcgattgcatgaaatcttgaccgtcaagcggccactcttatcgtttaagaataatacagaacgaattatgatagaaattagcaatgttaaagtgactcctccagattactcacctataatcgcgagtattaaaggtaagagttatgacgcattagccacgttcactgtaaatatctttaaagaggtaatgaccaaagagggtatatccatcactaaaataagtagttatgagggaaaagattctcatttgataaaaattccgctactaataggatacgggaataaaaatccacttgatacagccaagtatcttgttcctaatgtcataggtggagtctttatcaataaacaatctgtcgaaaaagtaggaattaatctagtagaaaagattacaacatggccaaaatttagggttgttaagccaaactcattcactttctcgttttcctccgtatcccctcctaatgtattaccgacaagatatcgccattacaagatatctctggatatatcacaattggaagcgttgaatatatcatcgacaaagacatttataacggtcaatattgttttgctgtctcaatatttatctagagtgagtctagaattcattagacgtagtttatcatacgatatgcctccagaagttgtctatctagtaaacgcgataatagatagtgctaaacgaattactgaatctattactgactttaatattgatacatacattaatgacctggtggaagctgaacacattaaacaaaaatctcagttaacgatcaacgagttcaaatatgaaatgctgcataactttttacctcatatgaactatacacccgatcaactaaagggattttatatgatatctttactaagaaagtttctctactgtatctaccacacttctagatatccagatagagattcgatggtttgtcatcgcatcctaacgtacggcaaatattttgagacgttggcacatgatgaattagagaattacataggcaacatccgaaacgatatcatgaacaatcacaagaacagaggcacttacgcggtaaacattcatgtactaacaactcctggacttaatcatgcattttctagtctattgagtggaaagttcaaaaagtcagacggtagttatcgaacacatcctcactattcatggatgcagaatatttctattcctaggagtgttggattttatccggatcaagtaaagatttcaaagatgttttctgtcagaaaataccatccaagtcaatatctttacttttgttcatcggacgttccggaaagaggtcctcaggtaggtttagtatctcaattgtctgtcttgagttccattacaaatatactaacgtctgagtatttggatttggaaaagaaaatttgtgagtatatcagatcatattataaagatgatataagttactttgaaacaggatttccaatcactatagaaaatgctctagtcgcatctcttaatccaaatatgatatgtgattttgtaactgactttagacgtagaaaacggatgggattcttcggtaacttggaggtaggtattactttagttagggatcacatgaatgaaattcgcattaatattggagcgggaagattagtcagaccattcttggttgtggataacggagagctcatgatggatgtgtgtccggagttagaaagcagattagacgacatgacattctctgacattcagaaagagtttccgcatgtcatcgaaatggtagatatagaacaatttacttttagtaacgtatgtgaatcggttcaaaaatttagaatgatgtcaaaggatgaaagaaagcaatacgatttatgtgactttcctgccgaatttagagatggatatgtagcatcttcactagtgggaatcaatcacaattctggacccagagctattcttggatgtgctcaagctaaacaagctatctcttgtctgagctcggatatacgaaataaaatagacaatggaattcatttgatgtatccagagaggccaatcgtgattagtaaggctttagaaacttcaaagattgcggctaattgcttcggccaacatgttactatagcattaatgtcgtacaaaggtatcaatcaagaggatggaattatcatcaaaaaacaatttattcagagaggcggtctcgatattgttacagccaagaaacatcaagtagaaattccgttggaaaactttaataacaaagaaagagataggtctaacgcctattcaaaattagaaagtaatggattagttagactgaatgctttcttggaatccggagacgctatagcacgaaatatctcatcaagaactcttgaagatgattttgctagagataatcagattagctttgatgtttccgaaaaatataccgatatgtacaaatctcgcgttgaacgagtacaagtagaacttactgacaaagttaaggtacgagtattaaccatgaaagaaagaagacccattctaggagacaaatttaccactagaacgagtcaaaagggaacagtcgcgtatatcgcggatgaaacggaacttccatacgatgaaaatggtatcacaccagatgtcattattaattctacatccatcttctctagaaaaactatatctatgttgatagaggttattttaacagccgcatattctgctaagccgtacaacaataagggagaaaaccgacctgtctgttttcctagtagtaacgaaacatccatcgatacatatatgcaattcgctaaacaatgttatgagcattcaaatccgaaattgtctgatgaagaattatcggataaaatcttttgtgaaaagattctctatgatcctgaaacggataagccttatgcatccaaagtattttttggaccaatttattacttgcgtctgaggcatttaactcaggacaaggcaaccgttagatgtagaggtaaaaagacgaagctcattagacaggcgaatgagggacgaaaacgtggaggaggtatcaagttcggagaaatggagagagactgtttaatagcgcatggtgcagccaatactattacagaagttttgaaagattcggaagaagattatcaagatgtgtatgtttgtgaaaattgtggagacatagcagcacaaatcaagggtattaatacatgtcttagatgttcaaaacttaatctctctcctctcttaacaaaaattgataccacgcacgtatctaaagtatttcttactcaaatgaacgccagaggcgtaaaagttaaattagatttcgaacgaaggcctccttcgttttataaaccattagataaagttgatctcaaaccgtcttttctggtgtaatattctagtttggtagtagatacatatcaatatcatcaaattcgagatccgaattataaaatgggcgtggattgttaactatagaatcggacgtctgatattcgaaaatctgtggagttttaggttttggtggaggtgtaactgctacttgggatactgaagtctgatattcagaaagctgggggatgttctggttcgacatccaccgatggtgtcacatcactaatcggttcggtaacgtctgtggacgatggaggcaccacttctacaggttctggttctttatcctcagtcatcaacggagctacttcaatgcgaggaaatgtataatttggtaatggtttctcatgtggatctgaagaagaggtaagatatctactagaaagataccgatcacgttctagttctcttttgtagaacttaactttttctttctccgcatctagttgatattccaacctcttcacgttcgcatgggttacctccgcagtttttacgagcgatttcacgttcagccttcatgcgtcttatagcatgaattcgcttatcgttatcgggtttagcttctgtcaccttagcaattccttttttattaaactctacataatcatatccatttctattgtttgttctaatataaacgagtatagcatcattgctaaatttttcaatagtatcgaaaacagaatatcctaaaccatataatatatattcaggaacactcaaactaaatgtccaggattctcctaaatacgtaaactttaatagtgcgaaatcattcaaaaatctaccacttatagatagatagatagtacataaatgcgtatagtagtctacctatctctttattatgaaaaccggcattacgatcatatatgtcgtgatatacctgtgatccgtttacgttaaaccataaatacatgggtgatcctataaacatgaatttatttctaattctcagagctatagttaattgaccgtgtaatatttgcttacatgcatacttgatacgatcattaataagatttttatcattgctcgttatttcagaatcgtatatataaggagtaccatcgtgattcttaccagatattatacaaaatactatatataaaatatattgacccacgttagtaatcatgtaaatgtttaacgttttaaattttgtattcaatgatccattatcatacgctagcatggtcttatgatattcattctttaaaatataatattgtgttagccattgcattggggctcctaatggagattttttattctcatccattttaggataggctttcataaagtccctaataacttcgtgaataatgtttctatgttttctactgatgcatgtatttgcttcgatttttttatcccatgtttcatctatcatagatttaaacgcagtaatgctcgcaacattaacatcttgaaccgttggtacaattccgttccataaatttataatgttcgccatttatataactcattttttgaatatacttttaattaacaaaagagttaagttactcatatggacgccgtccagtctgaacatcaatctttttagccagagatatcatagccgctcttagagtttcagcgtgattttccaacctaaatagaacttcatcgttgcgtttacaacacttttctatttgttcaaactttgttgttacattagtaatctttttttccaaattagttagccgttgtttgagagtttcctcattgtcgtcttcatcggctttaacaattgcttcgcgtttagcctctggctttttagcagccgttgtagaaaaaaattcagttgctggaattgcaagatcgtcatctccggggaaaagagttccgtccatttaaagtacagattttagaaactgacactctgcgttatttatatttggtacaacacatggattataaatattgatgttaataacatcagaaaatgtaaagtctatacattgttgcatcgtgttaaattttctaatggatctagtattattgggtccaacttctgcctgaaatccaaatatggaagcggatacaaaaccgtttcctggataaaccacacatctccacttttgctttacatcagaaattgtgtcgttgacatcttgaactctcctatctaatgccggtgttccacctatagattttgaatattcgaatgctgcatgagtagcattaaattccttaatattgccataattttcatatattgagtaaccctggataaaaagtaaacacaccgcagccgtagctaccacaataaaaaaaattgatagagagttcatttataatctattagaagctgacaaaatttttttacacgcatcagacaatgctttaataaatagttcaacatctacttttgtcatatcgaaccgatggtatgattctaacctagaattacatccgaaaaagttgactatgttcatagtcattaagtcattaacaaacaacattccagactctggattataagacgatactgtttcgtcacaattacctaccttaatcatgtgattatgaatattggctattagagcaccttctaagaaatctataatatctttgaaacacgatttaaaatcaaaccacgaatatacttctacgaagaaagttagtttacccataggagaaataactataaatggagatctaaatacaaaatccggatctatgatagttttaacattattatattctctattaaatacctccacatctaaaaatgttaattttgaaactatgtcttcgtttattaccgtacctgaactaaacgctataagctctattgtttgagaactctttaaacgatattcttgaaatacatgtaacaaagtttcctttaactcggtcggtttatctaccatagttacagaatttgtatccttatctataatataataatcaaaatcgtataaagttatataattatcgcgttcagattgggatcttttcaaatagactaaaaaccccatttctctagtaagtatcttatgtatatgtttgtaaaatatcttcatggtgggaatatgctctaccgcagttagccattcctcattgacagcggtagatgtattagacaaaactattccaatgtttaacaagggccattttacgagattattaaatccttgtttgataaatgtagccaatgagggttcgagttcaacgacgattgaattctcttcccgcggatgctgcatgatgaacgacgggatgttgttcgattgatttggaattctttttcgactttttgtttatattaaatattttaaaatttatagcggatagcaattcatgtaccacggataatgtagacgcgtattgcgcatcgatatctttattattagataaatttatcaataaatgtgagaagtttgcctcgttaaggtcttccatttaaatattatataaacatttgtgtttgtatcttattcgtcttttatggaatagttttttactagtaaagctgcaattacacactttgtccgtaaaacataaatataaacaccagcttttatcaatcgttccaaaaagtcgacggcggacatttttaacatggcatctattttaaatacacttaggtttttggaaaaaacatcattttataattgtaacgattcaataactaaagaaaagattaagattaaacataagggaatgtcatttgtattttataagccaaagcattctaccgttgttaaatacttgtctggaggaggtatatatcatgatgatttggttgtattggggaaggtaacaattaatgatctaaagatgatgctattttacatggatttatcatatcatggagtgacaagtagtggaacaatttacaaattgggatcgtctatcgatagactttctctaaataggactattgttacaaaagttaataattataattatgatacattttttgacgatgatgattgatcgctattgcacaattttgtttttttactttctaatatagcgtttagattctttttcatgtgcgaatattgatttactaaaatatctatgtttaacttttgttctataacgtccttatcggcggtatcggtacatatacgtaattcaccttcacaaaatacggagtcttcgataataatagccaatcgattattggatctagctgtctgtatcatattcaacatgtttaatatatcctttcgtttcccctttacaggcatcgatcgtagcatattttccgcgtctgagatggaaatgttaaaactacaaaaatgcgtaatgttagcccgtcctaatattggtacgtgtctataagtttggcatagtagaataatagacgtgtttaaatgccttccaaagtttaagaattctattagagtattgcattttgatagtttatcgcctacatcatcaaaaataagtaaaaagtgtgctgattttttatgattttgtgcgacagcaatacatttttctatgttacttttagttcgtatcagattatattctagagattcctgactactaacgaaattaatatgatttggccaaatgtatccatcataatctggattataaacgggtgtaaacaagaatacatgtttatattttttaactagtgtagaaaacagagatagtaaatagatagtttttccagatccagatcctcccgttaaaaccattctaaacggcatttttaataaattttctcttgaaaattgtttttcttggaaacaattcataattatatttacagttactaaattaatttgataataaatcaaaatatggaaaactaaggtcgttagtagggaggagaacaaagaaggcacatcgtgacataaataacatttattatcatgatgacaccagaaaacgacgaagagcagacatctgtgttctccgctactgtttacagagacaaaattcagggaaagaataaacgcaaacgcgtgattggtctatgtattagaatatctatggttatttcactactatctatgattaccatgtccgcgtttctcatagtgcgcctaaatcaatgcatgtctgctaacgaggctgctattactgacgccgctgttgccgttgctgctgcatcatctactcatagaaaggttgcgtctagcactacgcaatatgatcacaaagaaagctgtaatggtttatattaccagggttcttgttatatattacattcagactaccagttattctcggatgctaaagcaaattgcactgcggaatcatcaacactacccaataaatccgatgtcttgactacctggctcattgattatgttaaggatacatggggatctgatggtaatccaattacaaaaactacatccgattatcaagattctgatgtatcacaagaagttagaaagtatttttgtgttaaaacaatgaactaatatttatttttgtacattaataaatgaaatcgcttaatagacaaactgtaagtaggtttaagaagttgtcggtgccggtcgctataatgatgatactctcaaccattattagtggcataggaacatttctgcattacaaagaagaactgatgcctagtgcttgcgccaatggatggatacaatacgataaacattgttatttagatactaacattaaaatgtctacagataatgcggtttatcagtgtcgtaaattacgagccagattgcctagaccggatactagacatctgagagtattgtttagtattttttataaagattattgggtaagtttaaaaaagaccaatgataaatggttagatattaataatgataaagatatagatattagtaaattaacaaattttaaacaactaaacagtacgacggatgctgaagcgtgttatatatacaagtctggaaaactggttaaaacagtatgtaaaagtactcaatctgtactatgtgttaaaaaattctacaagtgacaacaaaaaatgaattaataataagtcgttaacgtacgccgccatggacgccgcgtttgttattactccaatgggtgtgttgactataacagatacattgtatgatgatctcgatatctcaatcatggactttataggaccatacattataggtaacataaaaactgtccaaatagatgtacgggatataaaatattccgacatgcaaaaatgctactttagctataagggtaaaatagttcctcaggattctaatgatttggctagattcaacatttatagcatttgtgccgcatacagatcaaaaaataccatcatcatagcatgcgactatgatatcatgttagatatagaagataaacatcagccattttatctattcccatctattgatgtttttaacgctacaatcatagaagcgtataacctgtatacagctggagattatcatctaatcatcaatccttcagataatctgaaaatgaaattgtcgtttaattcttcattctgcatatcagacggcaatggatggatcataattgatgggaaatgcaatagtaattttttatcataaaagttgtaaagtaaataataaaacaataaatattgaactagtagtacgtatattgagcaatcagaaatgatgctggtacctcttatcacggtgaccgtagttgcgggaacaatattagtatgttatatattatatatttgtaggaaaaagatacgtactgtctataatgacaataaaattatcatgacaaaattaaaaaagataaagagttctaattccagcaaatctagtaaatcaactgatagcgaatcagactgggaggatcactgtagtgctatggaacaaaacaatgacgtagataatatttctaggaatgagatattggacgatgatagcttcgctggtagtttaatatgggataacgaatccaatgttatggcgcctagcacagaacacatttacgatagtgttgctggaagcacgctgctaataaataatgatcgtaatgaacagactatttatcagaacactacagtagtacttaatgaagataccaaacagaatcctaactattcatccaatcctttcgtaaattataataaaaccagtatttgtagcaagtcaaatccgttcattacagaactcaacaataaatttagtgagaataatccgtttagacgagcacatagcgatgattatcttaataagcaagaacaagatcatgaacacgatgatatagaatcattggtgtgattagtttcctttttataaaattgaagtaatatttagtattattgctgccgtcacgttgtacaaatggagatattccctgtattcggcatttctaaaattagcaattttattgctaataatgactgtagatattatatagatacagaacatcaaaaaattatatctgatgagatcaatagacagatggatgaaacggtacttcttaccaacatcttaagcgtagaagttgtaaatgacaatgagatgtaccatcttattcctcatagattatcgacgattatactctgtattagttctgtcggaggatgtgttatctctatagataatgacgtcaatggcaaaaatattctaacctttcccattgatcatgctgtaatcatatccccactgagtaaatgtgtcgtagttagcaagggtcctacaaccatattggttgttaaagcggatatacctagcaaacgattggtaacatcgtttacaaacgacatactgtatgtaaacaatctatcactgattaattattcgccgttgtctgtattcattattagacgagttaccgactatttggatagacacatatgcgatcagatatttgcgaataataagtggtattccattataaccatcgacaataagcagtttcctattccatcaaactgtataggtatgtcctctgccaagtacataaattctagcatcgagcaagatactttaatacatgtttgtaacctcgagcatccattcgacttagtatacaaaaaaatgcagtcgtacaattctgtacctatcaaggaacaaatattgtacggtagaattgataatataaatatgagcattagtatttctgtggattaatagatttctagtatggggatcattaatcatctctaatctctaaatacctcataaaacgaaaaaaaagctattatcaaatactgtacggaatggattcattctcttctctttttatgaaactctgttgtatatctactgataaaactggaagcaaaaaatctgataaaaagaataagaataagatcaaggattattataaaataacaatagttcctggttcctcttccacgtctactagctcgtggtattatacacatgcctagtaatagtctctttgcgttgacggaaagcagactagaaataacaggctaaaatgttcagacaccataatagttcccaacccagataataacagagtaccatcaacacattcctttaaactcaatcccaaacccaaaaccgttaaaatgtatccggccaattgatagtagataatgaggtgtacagcgcatgatgatttacacagtaaccaaaatgaaaatactttagtaattataagaaatatagatggtaacgtcatcatcaacaatccaataatatgccggagagtaaacattgacggataaaacaaaaatgctccgcataactctatcatggcaataacacaaccaaatacttgtaagattcctaaattagtagaaaatacaacggatatcgatgtataagtgatctcgagaaataataagaataaagtaatgcccgtaaagataaacatcaacattgtttggtaatcattaaaccaattagtatgaagttgaactaatttcacagtagattttattccagtattatccccgcatgtataagtacctggtaagatatctttatattccataatcaatgagacatcactatctgataacgaatgaagtctagcactagtatgccatttacttaatattgtcgtcttggaagttttattataagttaaaatatcatggttatccaatttccatctaatatactttgtcggattatctatagtacacggaataatgatggtatcattacatgctgtatactctatggtctttgtagttgttataacaaccaacgtatagaggtatatcaacgatattctaactcttgacattttttatttatttaaaatgatacctttgttatttattttattctattttgctaacggtattgaatggcataagtttgaaacgagtgaagaaataatttctacttacttattagacgacgtattatacacgggtgttaatggggcggtatacacattttcaaataataaactaaacaaaactggtttaactaataataattatataacaacatctataaaagtagaggatgcggaaccaataacggaaatcccaaatgttggaaaatagacggttcagacgacccaaaacatagaggtagaggatacgctccttatcaaaatagcaaagtaacgataatcagtcacaacggatgtgtactatctgacataaacatatcaaaagaaggaattaaacgatggagaagatttgacggaccatgtggttatgatttatacacggcggataacgtaattccaaaagatggtttacgaggagcattcgtcgataaagatggtacttatgacaaagtttacattcttttcactgatactatcggctcaaagagaattgtcaaaattccgtatatagcacaaatgtgcctaaacgacgaaggtggtccatcatcattgtctagtcatagatggtcgacgtttctcaaagtcgaattagaatgtgatatcgacggaagaagttatagacaaattattcattctagaactataaaaacagataatgatacgatactatatgtattcttcgatagtccttattccaagtccgcattatgtacctattctatgaataccattaaacaatctttttctacgtcaaaattggaaggatatacaaagcaattgccgtctccagctcctggtatatgtttaccagctggaaaagttgttccacataccacgtttgaagtcatagaaaaatataatgtactagatgatattataaagcctttatctaaccaacctatcttcgaaggaccgtctggtgttaaatggttcgatataaaggagaaggaaaatgaacatcgggaatatagaatatacttcataaaagaaaattctatatattcgttcgatacaaaatctaaacaaactcgtagctcgcaagtcgatgcgcgactattttcagtaatggtaacttcgaaaccgttatttatagcagatatagggataggagtaggaatgccacaaatgaaaaaaatacttaaaatgtaatcttaatcgagtacaccgcacgacaatgaacaaacataagacagattatgctggttatgcttgctgcgtaatatgcggtctaattgttggaattatttttacagcgacactattaaaagttgtagaacgtaaattagttcatacaccatcaatagataaaacgataaaagatgcatatattagagaagattgtcctactgactggataagctataataataaatgtatccatttatctactgatcgaaaaacctgggaggaaggacgtaatgcatgcaaagctctaaatccaaattcggatctaattaagatagagactccaaacgagttaagttttttaagaagcattagacgcggatattgggtaggagaatccgaaatattaaaccagacaaccccatataattttatagctaaaaatgccacgaagaatggaactaaaaaacggaaatatatttgtagtacaacgaatactcccaaactacatttttatcataccactacttcggttagatgttttagaaaaaaataaatatcgccgtaccgttcttgtttttataaaaataacaattaacaattatcaaattttttctttaatattttacgtggttgaccattcttggtggtaaaataatctcttagtgttggaatggaatgctgtttaatgtttccgcactcatcgtatattttgacgtatgcagtcacatcgtttacgcaatagtcagactgtagttctatcatgcttcctacatcagaaggaggaacagttttaaagtctcttggttttaatctattgccattagttttcatgaaatcctttgttttatccacttcacattttaaataaatgtccactatacattcttctgttaattttactagatcgtcatgggtcatagaatttataggttccgtagtccatggatccaaactagcaaacttcgcgtatacggtatcgcgattagtgtatacaccaactgtatgaaaattaagaaaacagtttaataaatcaacagaaatatttaatcctccgtttgatacagatgcgccatatttatggatttcggattcacacgttgtttgtctgaggtgttcgtctagtgttgcttctacgtaaacttcgattcccatatattctttattgtcagaatcgcataccgatttatcatcatacactgtttgaaaactaaatggtatacacatcaaaataataaataataacgagtacattctgcaatattgttatcgtaattggaaaaatagtgttcgagtgagttggattatgtgagtattggattgtatattttattttatattttatattttgtagtaagaatagaatgctaatgtcaagtttattccaatagatgtcttattaaaaaacatatataataaataacaatggctgaatggcataaaattatcgaggatatctcaaaaaataataagttcgaggatgccgccatcgttgattacaagactacaaagaatgttctagctgctattcctaacagaacatttgccaagattaatcctctcatcactaatcgtaatattctaaaacctcttattggtcagaaatattgtattgtatatactaactctctaatggatgagaacacgtatgctatggagttgcttactgggtacgcccctgtatctccgatcgttatagcgagaactcataccgcacttatatttttgatgggtaagccaacaacatccagacgtgacgtgtatagaacgtgtagagatcacgctacccgtgtacgtgcaactggtaattaaaataaaaagtaatattcatatgtagtgtcaattttaaatgatgatgatgaaatggataatatccatattgacgatgtcaataatgccggtattggcatacagttcatcgatttttagatttcattcagaggatgtggaattatgttatgggcatttgtattttgataggatctataatgtagtaaatataaaatataatccgcatattccatatagatataattttattaatcgcacgttaaccgtagatgaactagacgataatgtcttttttacacatggttattttttaaaacacaaatatggttcacttaatcctagtttgattgtctcattatcaggaaacttaaaatataatgatatacaatgctcagtaaatgtatcgtgtctcattaaaaatttggcaacgagtacatctactatattaacatctaaacataagacttattctctacatcggtccacgtgtattactataataggatacgattctattatatggtataaagatataaatgacatctatgattttactgcaatatgtatgctaatagcgtctacattgatagtgaccatatacgtgtttaaaaaaataaaaatgaactcttaattatgctatgctattagaaatggataaaatcaaaattacggttgattcaaaaattggtaatgttgttaccatatcgtataacttggaaaagataactattgatgtcacacctaaaaagaaaaaagaaaaggatgtattattagcgcaatcagttgctgtcgaagaggcaaaagatgtcaaggtagaagaaaaaaatattatcgatattgaagatgacgatgatatggatgtagaaagcgcataatacgatctataaaaataagtatataaatactttttatttactgtactcttactgtgtagtggtgataccctactcgattatttttttaaaaaaaaatacttattctgattcttctagccatttccgtgttcgttcgaatgccacatcgacgttaaagataggggagtagttgaaatctagttctgcattgttggtacgcacctcaaatgtagtgttggatatcttcaacgtatagttgttgagtagtgatggttttctaaatagaattctcttcatatcattcttgcacgcgtacatttttagcatccatcttggaatcctagatccttgttctattcccaatggtttcatcaatagaagattaaacatatcgtacgaacacgatggagagtaatcgtagcaaaagtaagcatttcctttaatctcagatcccggatactggatatattttgcagccaacacgtgcatccatgcagcatttcctacatatacccggctatgtaccgcgttatcatcgactgtacgatacataatgttaccgtgttgcttacattgctcgtaaaagactttcatcaatttgtctccttctccgtaaattccagtgggtcttaggcaacaagtatacaattttgctccattcatgattacggaattattggctttcataaccagttgctcggccatacgtttactttttgcgtatacatgtcctggtgatatatcataaagggtatgctcatggccgatgaatggatcaccgtgtttattgggtcctattgcttccatgctactagtatagatcaaatacttgattcctaggtccacacaagctgccaatatagtctgtgttccataatagtttactttcatgatttcattatcggtgtattttccaaatacatccactagagcagctgtatgaataatcagatttaccccatctagcgcttctcttaccttatcaaagtcgtttatatcacattgtatatagtttataaccttaactttcgaggttattggttgtggatcttctacaatatctatgactctgatttcttgaacatcatctgcactaattaacagttttactatatacctgcctagaaatccggcaccaccagtaaccgcgtacacggccattgctgccactcataatatcagactacttattctattttactaaataatggctgtttgtataatagaccacgataatatcagaggagttatttactttgaaccagtccatggaaaagataaagttattggattaaaatccggaacgtatagtttgataattcatcgttacggagatattagtcaaggatgtgattccataggcagtccagaaatatttatcggtaacatctttgtaaacagatatggtgtagcatatgtttatttagatacagatgtaaatatatctacaattattggaaaggcgttatctatttcaaaaaatgatcagagattagcgtgtggagttattggtatttcttacataaatgaaaagataatacattttcttacaattaacgagaatggcgtttgatatatcagttaatgcgtctaaaacaataaatgcattagtttacttttctactcagcaaaataaattagtcatacgtaatgaagttaatgatacacactacactgtcgaatttgatagggacaaagtagttgacacgtttatttcatataatagacataatgactccatagagataagaggggtgcttccagaggaaactaatattggttgcgcggttaatacgccggttagtatgacttacttgtataataagtatagttttaaactgattttagcagaatatataagacacagaaatactatatccggcaatatttattcggcattgatgacactagatgatttggctattaaacagtatggagacattgatctattatttaatgagaaacttaaagtagactccgattcgggactatttgactttgtcaactttgtaaaggatatgatatgttgtgattctagaatagtagtagctctatctagtctagtatctaaacattgggaattgacaaataaaaaatataggtgtatggcattagccgaacatatatctgatagtattccaatatctgagctatctagactacgatacaatctatgtaagtatctacgcgggcacactgagagcatagaggatgaatttgattattttgaagacgatgattcgtctacatgttctgccgtaaccgacagggaaacggatgtataattttttttatagcgtgaaggatatgataaaaaatataattgttgtatttatcccattccaatcaccttatatgattctgtaacacaatgaaggagtcttatagatgtatagaggtcagatactggtttgataaactgtttattccacataagtatgtttgactttatggttagacccgcatactttaacaaatcactgaaaattggagttaggtattgacctctcagaatcagttgccgttctggaacattaaatgtattttttatgatatactccaacgcatttatgtgggcatacaacaagtcattactaatggagtattccaagagaagagatttcaacagactgtttatgaactcgaatgccgcctcattgtcgcttatattgatgatgtcgaattctcccaatatcatcaccgatgagtagctcatcttgttatcgggatccaagttttctaaagatgtcattaaaccctcgatcatgaatggatttatcatcatcgtttttatgttggacatgagcttagtccgtttgtccacatctatagacgacgatttctgaattatttcatatatccctctctttaactccaggaacttgtcaggatggtctactttaatatgttctcgtctaagagatgaaaatctttggatggttgcacgcgacttttctctaaaggatcctctcttaaatgaatccatcttatccttggacaagatggacagtctattttccttagatggtttaatatttttgttacccatgatctataaaggtagacctaatcgtctcggatgaccatatatttattttcagttttattatacgcataaattgtaaaaaatatgttaggtttacaaaaatgtctcgtggggcattaatcgtttttgaaggattggacaaatctggaaaaacaacacaatgtatgaacatcatggaatctataccggcaaacacgataaaatatcttaactttcctcagagatccactgtcactggaaagatgatagatgactatctaactcgtaaaaaaacctataatgatcatatagttaatctattattttgtgcaaatagatgggagtttgcatcttttatacaagaacaactagaacagggaattactttaatagttgatagatacgcattctctggagtagcgtatgccgccgctaaaggcgcgtcaatgactctcagtaagagttatgaatctggattgcctaaacccgacttagttatattcttggaatctggtagcaaagaaattaatagaaacgtcggcgaggaaatttatgaagatgttacattccaacaaaaggtattacaagaatataaaaaaatgattgaagaaggagatattcattggcaaattatttcttctgaattcgaggaagatgtaaagaaggagttgattaagaatatagttatagaggctatacacacggttactggaccagtggggcaactgtggatgtaatagtgaaattacattttttataaatggatgaagcatattactctggcaacttggaatcagtactcggatacgtgtccgatatgcataccgaactcgcatcaatatctcaattagttattgccaagatagaaactatagataatgatatattaaacaaggacattgtaaattttatcatgtgtagatcaaacttggataatccatttatctctttcctagatactgtatatactattatagatcaagagatctatcagaccgaattgattaattcattagacgacaatgaaattatcgattgtatagttaacaagtttatgagcttttataaggataacctagaaaatatagtagatgctatcattactctaaaatatataatgaataatccagattttaaaactacgtatgccgaagtactcggttccagaatagcggatatagatattaaacaagtgatacgtgagaatatactacaattgtctaataatatccgcgaacgatatttgtgaaaatattaaaaaaaaatactttttttattaaatgacgtcgcttcgcgaatttagaaaattatgctgtgatatatatcacgcatcaggatataaagaaaaatctaaattaattagagactttataacagatagggatgataaatatttgatcattaagctattgcttcccggattagacgatagaatttataacatgaacgataaacaaattataaaattatatagtataatatttaaacaatctcaggaagatatgctacaagatttaggatacggatatataggagacactattaggactttcttcaaagagaacacagaaatccgtccacgagataaaagcattttaactttagaagaagtggatagttttttaactacgttatcatccgtaactaaagaatcgcatcaaataaaattattgactgatatcgcatccgtttgtacatgtaatgatttaaaatgtgtagtcatgcttattgataaagatctaaaaattaaagcgggccctcggtacgtacttaacgctattagtcctcatgcctatgatgtgtttagaaaatctaataacttgaaagagataatagaaaatgcatctaaacaaaatctagactctatatctatttctgttatgactccaattaatcccatgttagcggaatcgtgtgattctgtcaataaggcgtttaaaaaatttccatcaggaatgtttgcggaagtcaaatacgatggtgaaagagtacaagttcataaaaataataacgagtttgccttctttagtagaaacatgaaaccagtactctctcataaagtggattatctcaaagaatacataccgaaagcatttaaaaaagctacgtctatcgtattggattctgaaattgttcttgtagacgaacataatgtaccgctcccgtttggaagtttaggtatacacaaaaagaaagaatataaaaactctaacatgtgtttgttcgtgtttgactgtttgtactttgatggattcgatatgacggacattccattgtacgaacgaagatcttttctcaaagatgttatggttgaaatacccaatagaatagtattctcagagttgacgaatattagtaacgagtctcagttaactgacgtattggatgatgcactaacgagaaaattagaaggattggtcttaaaagatattaatggagtatacgaaccgggaaagagaagatggttaaaaataaagcgagactatttgaacgagggttccatggcagattctgccgatttagtagtactaggtgcttactatggtaaaggagcaaagggtggtatcatggcagtctttctaatgggttgttacgacgatgaatccggtaaatggaagacggttaccaagtgttcaggacacgatgataatacgttaagggagttgcaagaccaattaaagatgattaaaattaacaaggatcccaaaaaaattccagagtggttagtagttaataaaatctatattcccgattttgtagtagaggatccaaaacaatctcagatatgggaaatttcaggagcagagtttacatcttccaagtcccataccgcaaatggaatatccattagatttcctagatttactaggataagagaggataaaacgtggaaagaatctactcatctaaacgatttagtaaacttgactaaatcttaatagttacatacaaattaaaataacactatttagttggtggtcgccatggatggtgttattgtatactgtctaaacgcgttagtaaaacatggcgaggaaataaatcatataaaaaatgatttcatgattaaaccatgttgtgaaaaagtcaagaacgttcacattggcggacaatctaaaaacaatacagtgattgcagatttgccatatatggataatgcggtatccgatgtatgcaattcactgtataaaaagaatgtatcaagaatatccagatttgctaatttgataaagatagatgacgatgacaagactcctactggtgtatataattattttaaacctaaagatgccattcctgttattatatccataggaaaggatagagatgtttgtgaactattaatctcatctgataaagcgtgtgcgtgtatagagttaaattcatataaagtagccattcttcccatggatgtttccttttttaccaaaggaaatgcatcattgattattctcctgtttgatttctctatcgatgcggcacctctcttaagaagtgtaaccgataataatgttattatatctagacaccagcgtctacatgacgagcttccgagttccaattggttcaagttttacataagtataaagtccgactattgttctatattatatatggttgttgatggatctgtgatgcatgcaatagctgataatagaacttacgcaaatattagcaaaaatatattagacaatactacaattaacgatgagtgtagatgctgttattttgaaccacagattaggattcttgatagagatgagatgctcaatggatcatcgtgtgatatgaacagacattgtattatgatgaatttacctgatgtaggcgaatttggatctagtatgttggggaaatatgaacctgacatgattaagattgctctttcggtggctggtaaaaaattgaaaataaatacaaaggttcttgagggttgtgttaaattgaaagcgagaaataatcataaataagataaacgccgccaccatgtttgtctttcttgtcttattgccactagtctctagtcagtgtgttaatcttacaaccagaactcaattaccacctgcatacactaattctttcacacgtggtgtttattaccctgacaaagtattcagatcctcagtattacattcaactcaggacttgttcttacctttcttctccaatgttacttggttccatgctatacatgtctctgggaccaatggtactaagaggtttgataaccctgtcctaccatttaatgatggtgtttatttcgcttccactgagaagtctaacataataagaggctggatatttggtactactttagattcgaagacccagtccctacttattgttaataacgctactaatgttgttattaaagtctgtgaatttcaattctgtaatgatccattcttgggtgtttattaccacaagaacaacaagagttggatggaaagtgagttcagagtttattctagtgcgaataattgcactttcgaatatgtctctcagcctttccttatggaccttgaaggtaaacagggtaatttcaagaatcttagggaatttgtgtttaagaatattgatggttatttcaagatatattctaagcacacgcctattaatttagtgcgtgatctccctcagggtttctcggctttagaaccattggtagatttgccaataggtattaacatcactaggtttcaaactttacttgctttacatagaagttatttgactcctggtgattcttcttcaggttggacagctggtgctgcagcttattatgtgggttatcttcaacctaggactttcctattgaaatataatgagaatggaaccattacagatgctgtagactgtgcacttgaccctctctcagaaacaaagtgtacgttgaaatccttcactgtagagaaaggaatctatcaaacttctaactttagagtccaaccaacagaatctattgttagatttcctaatattacaaacttgtgccctttcggtgaagtatttaacgccaccagatttgcatctgtttatgcttggaacaggaagagaatcagcaactgtgttgctgattattctgtcctatataattccgcatcattctccacatttaagtgttatggagtgtctcctactaaattaaatgatctctgctttactaatgtctatgcagattcatttgtaattagaggtgatgaagtcagacaaatcgctccagggcaaactggaaagattgctgattataattataaattaccagatgactttacaggctgcgttatagcttggaattctaacaatcttgattctaaggttggtggtaattataattacctgtatagattgtttaggaagtctaatctcaaacctttcgagagagatatttcaactgaaatctatcaggccggtagcacaccttgtaatggtgttgaaggatttaattgttactttcctttacaatcatatggtttccaacccactaatggtgttggttaccaaccatacagagtagtagtactttcatttgaacttctacatgcaccagcaactgtttgtggacctaagaagtctactaatttggttaagaacaaatgtgtcaatttcaacttcaatggtttaacaggcacaggtgttcttactgagtctaacaagaagtttctgcctttccaacaatttggcagagacattgctgacactactgatgctgtccgtgatccacagacacttgagattcttgacattacaccatgttcatttggtggtgtcagtgttataacaccaggaacaaatacttctaaccaggttgctgttctttatcaggatgttaactgcacagaagtccctgttgctattcatgcagatcaacttactcctacttggcgtgtttattctacaggttctaatgtatttcaaacacgtgcaggctgtttaataggagctgaacatgtcaacaactcatatgagtgtgacatacccattggtgcaggtatatgcgctagttatcagactcagactaattctcctcggcgggcacgtagtgtagctagtcaatccatcattgcctacactatgtcacttggtgcagagaattcagttgcttactctaataactctattgccatacccacaaactttactattagtgttaccacagaaattctaccagtgtctatgaccaagacatcagtagattgtacaatgtacatttgtggtgattcaactgaatgcagcaatctattgttgcaatatggcagtttctgtacacaattaaaccgtgctttaactggaatagctgttgaacaagacaagaacacccaagaagtatttgcacaagtcaaacaaatttacaagacaccaccaattaaagatttcggtggatttaatttctcacaaatattaccagatccatctaaaccaagcaagaggtcatttattgaagatctactattcaacaaagtgacacttgcagatgctggcttcatcaaacaatatggtgattgccttggtgatattgctgctagagacctcatttgtgcacagaagtttaacggccttactgtattgccacctttgctcacagatgaaatgattgctcaatacacttctgcactgttagcgggtacaatcacttctggttggacctttggtgcaggtgctgcattacaaataccatttgctatgcaaatggcttataggtttaatggtattggagttacacagaatgttctctatgagaaccagaaattgattgccaaccaatttaatagtgctattggcaagattcaagactcactttcttccacagcaagtgcacttggtaaacttcaagatgtggtcaaccagaatgcacaagctttaaacacgcttgttaaacaacttagctccaactttggtgcaatttcaagtgtattaaatgatatcctttcacgtcttgacaaagttgaggctgaagtgcaaattgataggttgatcacaggcagacttcaaagtttgcagacatatgtgactcaacaattaattagagctgcagaaatcagagcttctgctaatcttgctgctactaagatgtcagagtgtgtacttggacaatctaagagagttgatttctgtggaaagggctatcatcttatgtccttccctcagtcagcacctcatggtgtagtcttcttgcatgtgacttatgtccctgcacaagagaagaacttcacaactgctcctgccatttgtcatgatggtaaagcacactttcctcgtgaaggtgtctttgtttcaaatggcacacactggtttgtaacacaaaggaatttctatgaaccacaaatcattactacagacaacacatttgtgtctggtaactgtgatgttgtaataggaattgtcaacaacacagtttatgatcctttgcaacctgaattagactcattcaaggaggagttagataaatatttcaagaatcatacatcaccagatgttgatttaggtgacatctctggcattaatgcttcagttgtaaacattcagaaagaaattgaccgcctcaatgaggttgccaagaatttaaatgaatctctcatcgatctccaagaacttggaaagtatgagcagtatatcaaatggccatggtacatttggctaggtttcatagctggcttgattgccatagtaatggtgacaattatgctttgctgtatgaccagttgctgtagttgtctcaagggctgttgttcttgtggatcctgctgcaaatttgatgaagacgactctgagccagtgctcaaaggagtcaaattacattacacataaggcgcgcctttttatactagtatttggaaagttttataggtagttgatagaacaaaatacataattttgtaaaaataaatcactttttatactaatatgacacgattaccaatacttttgttactaatatcattagtatacgctacaccttttcctcagacatctaaaaaaataggtgatgatgcaactttatcatgtaatcgaaataatacaaatgactacgttgttatgagtgcttggtataaggagcccaattccattattcttttagctgctaaaagcgacgtcttgtattttgataattataccaaggataaaatatcttacgactctccatacgatgatctagttacaactatcacaattaaatcattgactgctagagatgccggtacttatgtatgtgcattctttatgacatcgcctacaaatgacactgataaagtagattatgaagaatactccacagagttgattgtaaatacagatagtgaatcgactatagacataatactatctggatctacacattcaccggaaactagttctgagaaacctgattatatagataattctaattgctcgtcggtattcgaaatcgcgactccggaaccaattactgataatgtagaagatcatacagacaccgtcacatacactagtgatagcattaatacagtaagtgcatcatctggagaatccacaacagacgagactccggaaccaattactgataaagaagaagatcatacagttacagacactgtctcatacactacagtaagtacatcatctggaattgtcactactaaatcaaccaccgatgatgcggatctttatgatacgtacaatgataatgatacagtaccatcaactactgtaggcggtagtacaacctctattagcaattataaaaccaaggactttgtagaaatatttggtattaccgcattaattatattgtcggccgtggcaatattctgtattacatattatatatataataaacgttcacgtaaatacaaaacagagaacaaagtctagatttttgacttacataaatgtctgggatagtaaaatctatcatattgagcgggccatctggtttaggaaagacagccatagccaaaagactatgggaatatatttggatttgtggtgtcccataccactagatttcctcgtcctatggaacgagaaggtgtcgattaccattacgttaacagagaggccatctggaagggaatagccgccggaacatactgagtttttaggaaatatttacggaacttctaaaactgctgtgaatacagcggctattaataatcgtatttgtgtgatggatctaaacatcgacggtgttagaagttttaaaaatacttacctaatgccttactcggtgtatataagacctacctctcttaaaatggttgagaccaagcttcgttgtagaaacactgaagcggatgatgagattcatcgtcgtgtgatgttggcaaaaactgacatggatgaggcaggtgaagccggtctattcgacactattatcattgaagatgatgtgaatttagcatatagtaagttaattcagatactacaggaccgtattagaatgtattttaacactaattagagacttaagacttaaaacttgataattaataatataactcgtttttatatgtggctatttcaacgtctaatgtattagttaaatattaaaacttaccacgtaaaacttaaaatttaaaatgatatttcattgacagatagatcacacattatgaactttcaaggacttgtgttaactgacaattgcaaaaatcaatgggtcgttggaccattaataggaaaaggtggatttggtagtatttatactactaatgacaataattatgtagtaaaaatagagcccaaagctaacggatcattatttaccgaacaggcattttatactagagtacttaaaccatccgttatcgaagaatggaaaaaatctcacaatataaagcacgtaggtcttatcacgtgcaaggcatttggtctatacaaatccattaatgtggaatatcgattcttggtaattaatagattaggtgcagatctagatgcggtgatcagagccaataataatagattaccaaaaaggtcggtgatgttgatcggaatcgaaatcttaaataccatacaatttatgcacgagcaaggatattctcacggagatattaaagcgagtaatatagtcttggatcaaatagataagaataaattatatctagtggattacggattggtttctaaattcatgtctaatggcgaacatgttccatttataagaaatccaaataaaatggataacggtactctagaatttacacctatagattcgcataaaggatacgttgtatctagacgtggagatctagaaacacttggatattgtatgattagatggttgggaggtatcttgccatggactaagatatctgaaacaaagaattgtgcattagtaagtgccacaaaacagaaatatgttaacaatactgcgactttgttaatgaccagtttgcaatatgcacctagagaattgctgcaatatattaccatggtaaactctttgacatattttgaggaacccaattacgacaagtttcggcacatattaatgcagggtgtatattattaagtgtggtgtttggttgatgtaaaatttttgtcgataaaaattaaaaaataacttaatttattattgatctcgtgtgtacaaccgaaatcatggcgatgttttacgcacacgctctcggtgggtacgacgagaatcttcatgcctttcctggaatatcatcgactgttgccaatgatgtcagtttataataacaagtatgacattgtaaaagacaaatatatgtggtgttacagtcaggtgaacaagagatatattggagcactgctgcctatgtttgagtgcaatgaatatctacaaattggagatccgatccatgatcaagaaggaaatcacatatcgccacaaaaactactatgctctaagcggaatcgggtacgagagtctagacttgtgtttggaaggagtagggattcatcatcacgtacttgaaacagaaaacgctgtatatggaaaagttcaacatgattattctactatcaaagagaaggccaaagaaatgaatgcactcagttcaggacctatcatcgattaccacgtctggataggagattgtatctgtcaagttactgctgtggacgtacatggaaaggaaattatgagaatgagattcaaaaagggtgcggtgcttccgatcccaaatctggtaaaagttaaacttggggagaatgatacagaaaatctttcttctactatatcggcggcaccatcgaggtaaccacctctctggaagacagtgtgaatcatgtactcatgaaacgtttggaatctatacgccatatgtggtctgttgtatatgatcattttgatattgtgaatggtaaagaatgctgttatgtgcatacgcatttgtctaatcaaaatcttataccgagtactgtaaaaacaaatttgtacatgaagactatgggatcatgcattcaaatgagtatcttagcgaactgaaggaatcaggtggatggagtcccagaccagaaatgcaggaatttgaatatccagatggagtggaagacactgaatcaattgagagattggtagaggagttcttcaatagatcagaacttcaggctggtaaatctattaatgttaaacatacatctgtttcagctaagcaactaagaacacgtatactctcatcttttgccaacacagagggtggatatttgttcattggagttgataataatacacacaaagtatttggattcacggtgggttacgactacctcagactgatagagaatgatatagaaaagcatatcaaaagactttgtgttgtgtatttctgtgagaagaaagaggacatcaagtacacgtgtcgattcatcaaggtatataaacctggggatgaggctacctcgacatacgtgtgcgctatcaaagtggaaagatgctgttgtgctgtgtttgcagattggccagaatcatggtatcaagaagtattctccagatgaataggtgtcacatataaaattttaattaatgtaactatagagaacaaataataggttgtaatatcatatagacaataactaacaattaattagtaactgttatctctttttaactaactaactatacctattaatacatcgtaattatagttcttaacatctattaatcattgattcgcttctttaattttttataaaccaacattgttaattgaaaagggataacatgttacagaatataaattatatatggattttttttaaaaaggaaatacttgactggagtgtatatttatctcttcattatatagcacgcgtgttttccaatttttccacatcccatataatacaggattataatctcgttcgaacatacgagaaagtggataaaacaatagttgattttttatctaggttgccaaatttattccatattttagaatatggggaaaatattctacatatttattctatggatgatgctaatacgaatattataattttttttctagatagagtattaaatattaataagaacgggtcatttatacacaatctcaggttatcatcatccattaatataaaagaatatgtatatcaattagttaataatgatcatccagataataggataagactaatgcttgaaaatggacgtagaacaagacattttttgtcctatatatcagatacagttaatatctatatatgtattttatatagatgccgaagacagttacggttgtacattattacatagatgtatatatcactataagaaatcagaatcagaatcagaatcatacaatgaattaattaagatattgttaaataatggatcagatgtagataaaaaagatacgtacggaaacacaccttttatcctattatgtaaacacgatatcaacaacgtggaattgtttgagatatgtttagagaatgctaatatagactctgtagactttaatagatatacacctcttcattatgtctcatgtcgtaataaatatgattttgtaaagttattaatttctaaaggagcaaatgttaatgcgcgtaataaattcggaactactccattttattgtggaattatacacggtatctcgcttataaaactatatttggaatcagacacagagttagaaatagataatgaacatatagttcgtcatttaataatttttgatgctgttgaatctttagattatctattatccagaggagttattgatattaactatcgtactatttacgacgctgtcagttataatgcgtataatacgttggtctatctattaaacagaaatggtgattttgagacgattactactagtggatgtacatgtatttcggaagcagtcgcaaacaacaacaaaataataatggaagtactattgtctaaacgaccatctttgaaaattatgatacagtctatgatagcaattactaaacataaacagcataatgcagatttattgaaaatgtgtataaaatatactgcgtgtatgaccgattatgatactcttatagatgtacaatcactacagcaatataaatggtatattttaagatgtttcgatgaaatagatatcatgaagagatgttatataaaaaataaaactgtattccaattagttttttgtatcaaagacattaatactttaatgagatacggtaaacatccttctttcgtgaagtgcactagtctcgacgtatacggaagtcgtgtacgtaatatcatagcatctattagatatcgtcagagattaattagtctattatccaagaagctggatcctggagataaatggtcgtgttttcctaacgaaataaaatataacgataacgaactgtccacatatctaaaaatcttataaacactattaaaatataaaatcacactacatcattgtttccttttagtgctcgacagtgtatactatttttaacgctcataaataaaaatgaaaacgatttccgttgttacgttgttatgcgtactacctgctgttgtttattcaacatgtactgtacccactatgaataacgctaaattaacgtctaccgaaacatcgtttaataataaccagaaagttacgtttacatgtgatcagggatatcattcttcggatccaaatgctgtctgcgaaacagataaatggaaatacgaaaatccatgcaaaaaaatgtgcacagtttctgattacatctctgaactatataataaaccgctatacgaagtgaattccaccatgacactaagttgcaacggcgaaacaaaatattttcgttgcgaagaaaaaaatggaaatacttcttggaatgatactgttacgtgtcctaatgcggaatgtcaacctcttcaattagaacacggatcgtgtcaaccagttaaagaaaaatactcatttggggaatatataactatcaactgtgatgttggatatgaggttattggtgcttcgtacataagttgtacagctaattcttggaatgttattccatcatgtcaacaaaaatgtgatataccgtctctatctaatggattaatttccggatctacattttctatcggtggcgttatacatcttagttgtaaaagtggttttatactaacgggatctccatcatccacatgtatcgacggtaaatggaatcccatactcccaacatgtgtacgatctaacgaaaaatttgatccagtggatgatggtcccgacgatgagacagatttgagcaaactctcgaaagacgttgtacaatatgaacaagaaatagaatcgttagaagcaacttatcatataatcatagtggcgttaacaattatgggcgtcatatttttaatctccgttatagtattagtttgttcctgtgacaaaaataatgaccaatataagttccataaattgctaccgtgaatataaatccgttaaaataatgaataattaataattaataatttaataacaaacaagtatcaaaagattaaagacttatagctagaatcaattgagatgtcttcttcagtggatgttgatatctacgatgccgttagagcatttttactcaggcactattataacaagagatttattgtgtatggaagaagtaacgccatattacataatatatacaggctatttacaagatgcgccgttataccgttcgatgatatagtacgtactatgccaaatgaatcacgtgttaaacaatgggtgatggatacacttaatggtataatgatgaatgaacgcgatgtttctgtaagcgttggcaccggaatactattcatggaaatgtttttcgattacaataaaaatagtatcaacaatcaactaatgtatgatataattaatagcgtatctataattctagctaatgagagatatagaagcgcttttaacgacgatggtatatacatccgtagaaatatgattaacaagttgtacggatacgcatctctaactactattggcacgatcgctggaggtgtttgttattatctgttgatgcatctagttagtttgtataaataattatttcaatatactagttaaaattttaagattttaaatgtataaaaaactaataacgtttttatttgtaataggtgcattagcatcctattcgaataatgagtacactccgtttaataaactgagtgtaaaactctatatagatggagtagataatatagaaaattcatatactgatgataataatgaattggtgttaaattttaaagagtacacaatttctattattacagagtcatgcgacgtcggatttgattccatagatatagatgttataaacgactataaaattattgatatgtctactattcaacgcagaggtcacacgtgtagaatatctaccaaattatcatgccattatgataagtacccttatattcacaaatatgatggtgatgagcgacaatattctattactgcagagggaaaatgctataaaggaataaaatatgaaataagtatgatcaacgatgatactctattgagaaaacatactcttaaaattggatctacttatatatttgatcgtcatggacatagtaatacatattattcaaaatatgatttttaaaaatttaaaatatattatcacttcagtgacagtagtcaaataacaaacaacaccatgagatatattataattctcgcagttttgttcattaatagtatacacgctaaaataactagttataagtttgaatccgtcaattttgattccaaaattgaatggactggggatggtctatacaatatatcccttaaaaattatggcatcaagacgtggcaaacaatgtatacaaatgtaccagaaggaacatacgacatatccgcatttccaaagaatgatttcgtatctttctgggttaaatttgaacaaggcgattataaagtggaagagtattgtacgggaccaccgactgtaacattaactgaatacgacgaccatccgtatgctactagaggtagcaaaaagattcctatttacaaacgcggtgacatgtgtgatatctacttgttgtatacggctaacttcacattcggagattctaaagaaccagtaccatatgatatcgatgactacgattgcacgtctacaggttgcagcatagactttgtcacaacagaaaaagtgtgcgtgacagcacagggagccacagaagggtttctcgaaaaaattactccatggagttcgaaagtatgtctgacacctaaaaagagtgtatatacatgcgcaattagatccaaagaagatgttcccaatttcaaggacaaaatggccagagttatcaagagaaaatttaactaaatttctcggtagcacatcaaatgatgttaccacttttcttagcatgcttaacttgactaaatattcataactaatttttattaatgatacaaaaacgaaataaaactgcatattatacactggttaacgcccttataggctctaaccattttcaagatgaggtccctgattatagtccttctgttcccctctatcatctactccatgtctattagacgatgtgagaagactgaagaggaaacatggggattgaaaatagggttgtgtataattgccaaagatttctatcccgaaagaactgattgcagtgttcatctcccaactgcaagtgaaggcaatggattcagggatatacgaaacaccgataaattataaaaaaagcaatgtgtccgctgtttccgttaataatactattttcgtaactggcggattattcataaataactctaatagcacgatcgtggttaacaatatggaaaaacttgacatttataaagacaaacaatggtcgattatagaaatgcctatggctagggtatatcacggcatcgactcgacatttggaatgttatattttgccggaggtctatccgttaccgaacaatatggtaatttagagaaaaacaacgagatatcttgttacaatcctagaacgaataagtggtttgatatttcatatactatttataagatatccatatcatcattgtgtaaactaaataacgtcttctatgtatttagtaaggacattggatatgtggaaaagtatgatggtctccccgctataaaggcattatcaacttctccttattgattgaaaatgaaaatataaatagtttttatgtatagcagtattaccctatagttttattgcttactactaacatggatacagatacagatgttacaaatgtagaagatatcatgaatgaaatagatagagagaaagaagaaatactaaaaaatgtagaaattgaaaataataaaaacattaacaagaatcatcccaatgaatatattagagaagcactcgttattaatacaagtagtaatagtgattccattgataaagaagttatagaatgtatcagtcacgatgtaggaatatagatcatatctactaatttttataatcaatacaaaacataaaaaacaactcgttattacatagcaggcatggaatccttcaagtattgttttgataacgatggcaagaaatggattatcggaaatactttatattctggtaattcaatactctataaggtcagaaaaaatttcactagttcgttctacaattacgtaatgaagatagatcacaaatcacacaagccattgttgtctgaaatacgattctatatatctgtattggatcctttgactatcgacaactggacacgggaacgtggtataaagtatttggctattccagatctgtatggaattggagaaaccgatgattatatgttcttcgttataaagaatttgggaagagtattcgccccaaaggatactgaatcagtcttcgaagcatgcgtcactatgataaacacgttagagtttatacactctcgaggatttacccatggaaaaatagaaccgaggaatatactgattagaaataaacgtctttcactaattgactattctagaactaacaaactatacaagagtggaaactcacatatagattacaacgaggacatgataacttcaggaaatatcaattatatgtgtgtagacaatcatcttggagcaacagtttcaaaacgaggagatttagaaatgttgggatattgcatgatagaatggttcggtggcaaacttccatggaaaaacgaaagtagtataaaagtaataaaacaaaaaaaagaatataaaaaatttatagctactttctttgaggactgttttcctgaaggaaatgaacctctggaattagttagatatatagaattagtatacacgttagattattctcaaactcctaattatgacagactacgtagactgtttatacaagattgaaatattctttttttatagagtgtggtagtgttacggatatctaatattaatattagactatctctatcgcgctacacgaccaatatcgattactatggatatcttctatgaaaggagagaatgtattcatttctccagcgtcaatctcgtcagtattgacaatactgtattatggagctaatggatccactgctgaacagctatcaaaatatgtagaaaaggaggagaacacggataaggttagcgctcagaatatctcattcaaatccatgaataaagtatatgggcgatattctgccgtgtttaaagattcctttttgagaaaaattggcgataagtttcaaactgttgacttcactgattgtcgcactatagatgcaatcaacaagtgtgtagatatctttactgaggggaaaatcaatccactattggatgaacaattgtctcctagcaattagtgccgtatactttaaagcaaaatggttgacgccattcgaaaaggaatttaccagtgattatcccttttacgtatcaccaacggaaatggtagacgtaagtatgatgtctatgtacggcgagctatttaatcacgcatctgtaaaagaatcattcggtaacttttcaatcatagaactgccatatgttggagatactagtatgatggtcattcttccagacaagattgatggattagaatccatagaacaaaatctaacagatacaaattttaagaaatggtgtaactctctggaagctacgtttatcgatgttcacattcccaagtttaaggtaacaggctcgtataatctggtggatactctagtaaagtcaggactgacagaggtgttcggttcaactggagattatagcaatatgtgtaatttagatgtgagtgtcgacgctatgatccacaaaacgtatatagatgtcaatgaagagtatacagaagcagctgcagcaacttgtgcactggtgtcagactgtgcatcaacaattacaaatgagttctgtgtagatcatccgttcatctatgtgattaggcatgttgatggaaaaatttttttcgttggtagatattgctctccgacaactaattgttaaccattttttttaaaaaaatagaaaaaacatgtggtattagtgcaggtcgttattcttccaattgcaattggtaagatgacggccaactttagtacccacgtcttttcaccacagcactgtggatgtgacagactgaccagtattgatgacgtcaaacaatgtttgactgaatatatttattggtcgtcctatgcataccgcaacaggcaatgcgctggacaattgtattccacactcctctcttttagagatgatgcggaattagtgttcatcgacattcgcgagctggtaaaaaatatgccgtgggatgatgtcaaagattgtgtagaaatcatccgttgttatataccggatgagcaaaaaaccatcatcggactttgtgcatatgctgctacttactggggaggtgaagaccatcccactagtaacagtctgaacgcattgtttgtgatgcttgagatgctaaattacgtggattataacatcatattccggcgtatgaattgatgagttgtacatcttgacattttcttctttcttctcttctccctttcccagaaacaaactttttttacccactataaaataaaatgagtatactacctgttatatttctttctatatttttttattcttcattcgttcagacttttaacgcgcctgaatgtatcgacaaagggcaatattttgcatcattcatggagttagaaaacgagccagtaatcttaccatgtcctcaaataaatacgctatcatccggatataatatattagatattttatgggaaaaacgaggagcggataatgatagaattataccgatagataatggtagcaatatgctaattctgaacccgacacaatcagactctggtatttatatatgcattaccacgaacgaaacctactgtgacatgatgtcgttaaatttgacaatcgtgtctgtctcagaatcaaatatagatcttatctcgtatccacaaatagtaaatgagagatctactggcgaaatggtatgtcccaatattaatgcatttattgctagtaacgtaaacgcagatattatatggagcgggcatcgacgccttagaaataagagacttaaacaacggacacctggaattattaccatagaagatgttagaaaaaatgatgctggttattatacatgtgttttagaatatatatacggtggcaaaacatataacgtaaccagaattgtaaaattagaggtacgggataaaataataccttctactatgcaattaccagaaggtgttgtaacttcaataggtagtaatttgactattgcgtgtagagtatcgttgagacctcccacaacggatgcagacgtcttttggataagtaatggtatgtattacgaagaagatgatggggacggagacggtagaataagtgtagcaaataaaatctatatgaccgataagagacgtgttattacatcccggttaaacattaatcctgtcaaggaagaagatgctacaacgtttacgtgtatggcgtttactattcctagcatcagcaaaacagttactgttagtataacgtgaatgtatgttgttacatttccatgtcaattgagtttataagaatttttatacattatcttccaacaaacaattgacgaacgtattgctatgattaactcccacgatactatgcatattattaatcattaacttgcagactatacctagtgctattttgacatactcatgttcttgtgtaattgcggtatctatattattaaagtacgtaaatctagctatagttttattatttaattttagataatataccgtctccttatttttaaaaattgccacatcctttattaaatcatgaatgggaatttctatgtcatcgttaatatattgtgaacaacaagagcagatatctataggaaagggtggaatgcgatacattgatctatgtagttttaaaacacacgcgaactttgaagaatttatataaatcattccatcgatacatccttctatgttgacatgtatatatccaggaattcttttattaatgtcaggaaatgtataaactaaaacattgcccgaaagcggtgcctctatctgcgttatatccgttcttaacttacaaaatgtaaccaatacctttgcatgacttgttttgttcggcaacgttagtttaaacttgacgaatggattaattacaatagcatgatccgcgcatctattaagtttttttactttaacgcccttgtatgtttttacagagactttatctaaatttctagtgcttgtatgtgttataaatataacgggatatagaactgaatcacctaccttagatacccaattacattttatcagatccagataataaacaaattttgtcgccctaactaattctatattgttatatattttacaattggttatgatatcatgtaataacttggagtctaacgcgcatcgtcgtacgtttatacaattgtgatttagtgtagtatatctacacatgtatttttccgcactatagtattctggactagtgataaaactatcgttatatctgtcttcaatgaactcatcgagatattgctctctgtcatattcatacacctgcataaactttctagacatcttacaatccgtgttattttaggatcatatttacatatttacgggtatatcaaagatgttagattagttaatgggaatcgtctataataatgaatattaaacaattatatgaggacttttaccacaaagcatcataaaaatgagtcgtcgtctgatttatgttttaaatatcaaccgcgaatcaactcataaaatacaagagaatgaaatatatacatattttagtcattgcaatatagaccatacttctacagaacttgattttgtagttaaaaactatgatctaaacagacgacaacctgtaactgggtatactgcactacactgctatttgtataataattactttacaaacgatgtactgaagatattattaaatcatggagtggatgtaacgatgaaaaccagtagcggacgtatgcctgtttatatattgcttactagatgttgtaatatttcacatgatgtagtgatagatatgatagacaaagataaaaaccacttatcgcatagagactattccaacctactactagagtatataaaatctcgttacatgttattgaaggaagaggatatcgatgagaacatagtatccactttattagataagggaatcgatcctaactttaaacaagacggatatacagcgttacattattattatttgtgtctcgcacacgtttataaaccaggtgagtgtagaaaaccgataacgataaaaaaggccaagcgaattatttctttgtttatacaacatggagctaatctaaacgcgttagataattgtggtaatacaccattccatttgtatcttagtattgaaatgtgtaataatattcatatgactaaaatgctgttgacttttaatccgaatttcaaaatatgtaataatcatggattaacgcctatactatgttatataacttccgactacatacaacacgatattcttgttatgttaatacatcactatgaaacaaatgttggagaaatgccgatagatgagcgtcgtataatcgtattcgagtttatcaaaacatattctacacgtccggcagattcgataacttatttgatgaataggtttaaaaatatagatatttatacccgctatgaaggaaagacattattacacgtagcatgtgaatataataatacacacgtaatagattatcttatacgtatcaacggagatataaatgcgttaaccgacaataacaaacacgctacacaactcattatagataacaaagaaaattccccatataccattaattgtttactgtatatacttagatatattgtagataagaatgtgataagatcgttggtggatcaacttccatctctacctatcttcgatataaaatcatttgagaaattcatatcctactgtatacttttagatgacacattttacaatagacacgttaggaatcgcaattctaaaacgtatcgatacgcattttcaaaatacatgtcgtttgataaatacgatggtataataactaaatgtcataaagaaacaatattgctcaaactatccactgttctagacactacactatatgcagttttaagatgccataattcgaaaaagttaagaagatacctcaacgagttaaaaaaatataataacgataagtcctttaaaatatattctaatattatgaatgagagataccttaatgtatattataaagatatgtacgtgtcaaaggtatatgataaactatttcctgttttcacagataaaaattgtctactaacattactaccttcagaaattatatacgaaatattatacatgctgacaattaacgatctttataatatatcgtatccacctaccaaagtatagttgtatttttctcatgcgatgtgtgtaaaaaaactgatattatataaatattttagtgccgtataatgaagatgacgatgaaaatgatggtacatatatatttcgtatcattattgttattgctattccacagttacgccatagacatcgaaaatgaaatcacagaattcttcaataaaatgagagatactctaccagctaaagactctaaatggttgaatccagcatgtatgttcggaggcacaatgaatgatatagccgctctaggagagccattcagcgcaaagtgtcctcctattgaagacagtcttttatcgcacagatataaagactatgtggttaaatgggagaggctagaaaaaaatagacggcgacaggtttctaataaacgtgttaaacatggtgatttatggatagccaactatacatctaaattcagtaaccgtaggtatttgtgtaccgtaactacaaagaatggtgactgtgttcagggtatagttagatctcatattaaaaaacctccttcatgcattccaaaaacatatgaactaggtactcatgataagtatggcatagacttatactgtggaattctttacgcaaaacattataataatataacttggtataaagataataaggaaattaatatcgacgatattaagtattcacaaacgggaaagaaattaattattcataatccagagttagaagatagtggaagatacaactgttacgttcattacgacgacgttagaatcaagatgtaaaatacttacggttataccgtcgcaagaccacaggtttaaactaatactagatccaaaaatcaacgtaacgataggagaacctgccaatataacatgcactgctgtgtcaacgtcattattgattgacgatgtactgattgaatgggaaaatccatccggatggcttataggattcgattttgatgtatactctgttttaactagtagaggcggtatcaccgaggcgaccttgtactttgaaaatgttactgaagaatatataggtaatacatataaatgtcgtggacacaactattattttgaaaaaacccttacaactacagtagtattggagtaaatacacaatgcatttttatatacattactgaataattattattattatttatatcgtatttgtgctataacgcgactatctaggtatttgtatctcaccgatagagaacatataaatgtagactctattaaacagttgtgtaaaatatcagatcctaatagatgtggatgtacggctttagaaatgagttcattaaaatatgtgatatcaacggaacatatttatataattatactattgctgttagtataattattgattccacggaagaactaccaacagttactccaattacaacaacatataattatactatcgatgatagcactactgaagaactacaagtgactcctcatatggatctccatcgatgatacatgtattaaaatactttccgaataagtcttttaaatattgtattaattatgaaaaactatgctatgcgagtatgatacgatactagattttatctctagcgagagatgtcgttagaatcatttatcaacgaatatcgataacatgtgtcatttatacgttaaagtctgtccgtcttctctattgtttagactgtttgtagaatgctgtgatataaacaaactagtagacacaaatatttaactcatgatgaagttgagaatgatatgctttagctaatataaaaatatattaatccactatatattctagacttgatttaaaaccgataaactactactacgtactgtataagttaggagcagaccctaattatgtagatgatagaggtaatacttctgcatctatatgtccacttatgagaaaacgtcatttaataagatgcatcgtgaaaagaaatttattaaagagttggtaaaatatgaaaccgaaagtaaataatataggaaatacacctctacataactacgtatctcaatatgatatcactctcattcctcatccacaacccattaaaaaatggaaattaaagccctctattagcataaacggctacaggtctacctttacaatggcctttccttgtgcccagttcagaccctgtcattgccacgctactaaggactccctgaataccgtggccgacgtcagacattgtctgactgaatacatcctgtgggtttctcatagatggacccatagagaaagcgcagggtctctctacaggcttctcatctctttcagaactgatgcaacggagctctttggtggtgagttgaaggattcacttccgtggagatcattaaatgactccatgaaaaccgccgaagaacttcgtgcaatcattggactttgtactcaatcagctatcgtctctggaagagtcttcaacgataagtatatcgacatactacttatgctgcgaaagattctgaacgagaacgactatctcaccctcttggatcatatccgcactgctaaatactaaatctccttcatgctctctcactacactttttatcatcttatgaggaataattagcaccagaatagctatggattgcacatgtattctatgtcgtctactggatgaagatgtgacgtacaaaaaaataaaactagaaattgaaacgtgtcacaacttatcaaaacatatagatagacgaggaaacaatgcgctacattgttacgtctccaataaatgcgatacagacattaagattgttcgactgttactctctcgcggagtcgagagactttgtagaaacaacgaaggattaactccgctaggagcatacagtaagcatagatacgtaaaatctcagattgtgcatctactgatatccagctattcgaattcctctaacgaactcaagtcgaatataaatgatttcgacttacgtctgctaaaatacctaattgtggataaacggatacgtccgtccaagaatacgaattatgcaatcaatggtctcggattggtggatatatacgtaacgacgcctaatccgagaccagaagtattgctatggcttcttaaatcagaatgttacagcaccggttacgtatttcgtacctgtatgtacaacagtgatatgtgtaagaactctcttcattactatatatcgtctcatagagaatctctatccaaggatgtaattaaatgtttgatcgataacaatgtttccatccaatactactggtcttgctcaaccatagatatagagattattaataaaggatgtggacacgtgtagagtatacgacgtcagccctatattagaggcgtattatctaaacaagcgatttagagtaaccccatataatgtagacatggaaatcgttaatcttcttattgagagacgtcatactcttgtcgacgtaatgcgtagtattacttcgtacgattccagagaatataaccactacatcatcgataacattctaaagagatttagacaacaggatgaatccatcgtacaagccatactgataaactacttacattacggcgatatggtaagtatacctatcattcaatgcatgttggataagacgacggacaacaactttgttaataataatctcgtcgatgtaaacgtcgtaaggtttatcgtggaaaatatggacacgcggctgtaaatcacatatctaacaatggccgtctatgtatgtacggtctgatattatcgagatttaataattgcgggtatcactgttatgaagatgtatttgatatactaagcaagtacatggatgatatagatatgatcgataactctactatattacgcggtcgatgtcaataatatacaatttgcaaagcggttattggaatatggagcgagtgtcacgctcgataatcaatacggccatccagaaaagcagttaccaaagagaagctagttgatttattactgagttaccatcccactctagagactatgattgacgcatttaatagagatatacgctatctatatcctgaaccattattcgcctgtatcagatacgccttaatcctagatgatgattttccttctaaagtaagtatgatatcgccggtcgtcataaggaactaaagcgctatagagcagacattaatagaatgaagaatgcctacatatcaggcgtctccatgtttgatatattatttaaacgaagcaaacgccacagattgagatacgcaaagaacaatgagaggatcgactccattaaataatttatcatggagtgataatgtcctgtttccatggcatattacaaaatcgattccgtccaagatgataaaaacatttaccggcatcataaacacggagtttattttatatgtctcgcataaacattactaaaaaaatatattgttcggttttctttcacatctttaattatgaaaaagtaaatcattatgagatggacgcatcgttcgcgacagtatgtggtacatacctaacgtatttatggacgacggtaagaatgaaggtcacgtttctgtcaacaatgtcgacgcgatcgtgtaacacgactcacaatagaatctgtgaatgctctcccgatcatggatgcaaggcatgtgtttcccaaacaaaatgtggaataggatacggagtatccggagacgtcatctgttctccgtgtggtctcggaacatattctcacaccgtctcttccgcagataaatgcgaacccgtacccagaaatacctttaactatatcgatgtggaaattaacctgtatccagttaacgacacatcgtgtactcggacgaccactaccggtctcagcgaatccatctcaacgtcggaactaactattactatgaatcataaagactgcgatcccgtcttcttaataaggtagcgacttcaggtttctttacaggagaaaggtgtgcactctgaatttcgagattaaatgcaataacaaagattcttcctccaaacagttaacgaaagcaaagaatgatactatcatgccgcattcggagacagtaactctagcgtcgacatctatatactatatagtaataccaatactcaagactacgaaactgatacaatctcttatcatgtgggtaatgtagccatatgcccggtagttgcgatatacataaactgatcactaattccaaacccacccgctttttatagtaagtttttcacccataaatacaataattaatttctcgtaaaagtagaaaatatattctaatttattgcacggtaaggaagtagaatcataaagaacagtactcaatcaatagcaatcatgaaacaatatatcgtactggcatgcatgtgcctgccagtcttcagcaatcatcctcatcgtgtacggaagaagaaaacaaacatcatatgggaatcgatgttattatcaaagtcacaaagcaagaccaaacaccgaccgatgataagatttgccaatccgtaacggaaattacagagtccgagtcagatccagatcccgaggtggaatcagtcgaggatgtagatcctcctaccacttattactccatcatcggtggaggtctgagaatgaactttggattcaccaaatgtcctcagattaaatccatctcagaatccgctgatggaaagactgtgaggtgtctatcgacatcagatgtagcgaagaagagaaagacagcgacatcaagacccatccagtactcgggtctaacatctctcataagaaagtgagttacgaagatatcatcggttcaacgatcgtcgatacaaaatgtgtcaagaatctagagtttagcgttcgtatcggagacatgtgcaaggaatcatctgaacttgaggtcaagtatgtcgacggatcggcatctgaaggtgcaaccgatgatacttcactcatcgattcaacaaaactcaaagcgtgtgtctgaatcgataactctattcatctgaaattggatgagtagggttaatcgaacgattcaggcacaccacgaattaaaaaagtgtaccggacactatattccggtttgcaaaacaaaaagttacctctcgcgacttcttctttttctgtctcaatagtgtgatacgattatgacactattcctatttcctttcagggtat

1. A method of vaccinating or protecting a subject against coronavirus disease 2019 (COVID-19); preventing a coronavirus infection; preventing, treating, or reducing the severity of COVID-19; or treating COVID-19 caused by a coronavirus infection, comprising administering to the subject a composition comprising a synthetic MVA (sMVA) vector comprising or capable of expressing one or more DNA sequences encoding a spike (S) protein and a nucleocapsid (N) protein or variants or mutants thereof, wherein the subject is a blood cancer patient that (1) has been treated for a hematological malignancy with a cellular therapy or (2) has had or is likely to have a poor immune response to a different COVID-19 vaccination.

2-16. (canceled)

17. The method of claim 1, wherein the cellular therapy is selected from the group consisting of an autologous hematopoietic cell transplant, an allogeneic hematopoietic cell transplant, a chimeric antigen receptor (CAR)-T cell therapy, and a combination thereof.

18. The method of claim 1, wherein the subject received the cellular therapy at least 1 week, at least 2 weeks, at least 3 weeks, at least 4 weeks, at least 1 month, at least 2 months, at least 3 months, at least 4 months, at least 5 months, at least 6 months, at least 7 months, at least 8 months, at least 9 months, at least 10 months, at least 11 months, or at least 12 months prior to administration of the composition.

19. The method of claim 1, wherein the coronavirus infection is caused by the Wuhan-Hu-1 reference strain or a variant of concern (VOC) selected from the group consisting of B.1.1.7 (Alpha), B.1.351 (Beta), P.1 (Gamma), B.1.617.2 (Delta), B.1.621 (Mu), C.37 (Lambda), C.1.2, BA.1 (Omicron), BA.2 (Omicron), BA.2.12.1 (Omicron), BA.4 (Omicron), BA.5 (Omicron), BA.2.75 (Omicron), BQ.1 (Omicron), BQ.1.1 (Omicron), and XBB (Omicron).

20. The method of claim 1, wherein the composition is administered by intramuscular injection, intranasal instillation, intradermal injection, and/or scarification.

21. The method of claim 1, wherein the composition is administered to the subject in a single dose, two doses, three doses, four doses, or more than four doses.

22. The method of claim 1, wherein the composition is administered to the subject in a prime dose followed by one or more booster doses.

23. The method or of claim 22, wherein an interval between the prime dose and the first booster dose is about 3 weeks, about 4 weeks, about 5 weeks, about 6 weeks, about 7 weeks, about 8 weeks, about 9 weeks, about 10 weeks, about 11 weeks, about 12 weeks, about 13 weeks, about 14 weeks, about 15 weeks, or about 16 weeks.

24. The method of claim 22, wherein the prime dose is between 1.0×10⁷ PFU/dose and 5.0×10⁸ PFU/dose, for example, about 1.0×10⁷ PFU/dose, about 1.5×10⁷ PFU/dose, about 2.0×10⁷ PFU/dose, about 2.5×10⁷ PFU/dose, about 3.0×10⁷ PFU/dose, about 3.5×10⁷ PFU/dose, about 4.0×10⁷ PFU/dose, about 4.5×10⁷ PFU/dose, about 5.0×10⁷ PFU/dose, about 5.5×10⁷ PFU/dose, about 6.0×10⁷ PFU/dose, about 6.5×10⁷ PFU/dose, about 7.0×10⁷ PFU/dose, about 7.5×10⁷ PFU/dose, about 8.0×10⁷ PFU/dose, about 8.5×10⁷ PFU/dose, about 9.0×10⁷ PFU/dose, about 9.5×10⁷ PFU/dose, about 1.0×10⁸ PFU/dose, about 1.5×10⁸ PFU/dose, about 2.0×10⁸ PFU/dose, about 2.5×10⁸ PFU/dose, about 3.0×10⁸ PFU/dose, about 3.5×10⁸ PFU/dose, about 4.0×10⁸ PFU/dose, about 4.5×10⁸ PFU/dose, or about 5.0×10⁸ PFU/dose.

25. The method of claim 22, wherein the booster dose is between 1.0×10⁷ PFU/dose and 5.0×10⁸ PFU/dose, for example, about 1.0×10⁷ PFU/dose, about 1.5×10⁷ PFU/dose, about 2.0×10⁷ PFU/dose, about 2.5×10⁷ PFU/dose, about 3.0×10⁷ PFU/dose, about 3.5×10⁷ PFU/dose, about 4.0×10⁷ PFU/dose, about 4.5×10⁷ PFU/dose, about 5.0×10⁷ PFU/dose, about 5.5×10⁷ PFU/dose, about 6.0×10⁷ PFU/dose, about 6.5×10⁷ PFU/dose, about 7.0×10⁷ PFU/dose, about 7.5×10⁷ PFU/dose, about 8.0×10⁷ PFU/dose, about 8.5×10⁷ PFU/dose, about 9.0×10⁷ PFU/dose, about 9.5×10⁷ PFU/dose, about 1.0×10⁸ PFU/dose, about 1.5×10⁸ PFU/dose, about 2.0×10⁸ PFU/dose, about 2.5×10⁸ PFU/dose, about 3.0×10⁸ PFU/dose, about 3.5×10⁸ PFU/dose, about 4.0×10⁸ PFU/dose, about 4.5×10⁸ PFU/dose, or about 5.0×10⁸ PFU/dose.

26. The method of claim 22, wherein the booster dose is administered in a dosage the same as the prime dose.

27. The method or of claim 22, wherein the booster dose is administered in a dosage lower than the prime dose.

28. The method of claim 1, wherein the subject suffers from or previously suffered from a hematological malignancy.

29. The method of claim 28, wherein the hematological malignancy is selected from the group consisting of myeloid neoplasm, myelodysplastic syndromes (MDS), myeloproliferative/myelodysplastic syndromes, acute lymphoblastic leukemia (ALL), chronic lymphocytic leukemia (CLL), acute myeloid leukemia (AML), chronic myelogenous leukemia (CML), blast crisis chronic myelogenous leukemia (bcCML), B-cell acute lymphoid leukemia (B-ALL), T-cell acute lymphoid leukemia (T-ALL), T-cell lymphoma, and B-cell lymphoma.

30. The method of claim 1, wherein the subject has previously received one or more COVID-19 vaccines.

31. The method of claim 30, wherein the previously received COVID-19 vaccine is an mRNA-, adenovirus-, or protein-based vaccine.

32. The method of claim 30, wherein the previously received COVID-19 vaccine is Pfizer-BioNTech COVID-19 vaccine (BNT162b2), Moderna COVID-19 vaccine (mRNA-1273), Janssen COVID-19 vaccine (Ad26.COV2.S), Novavax COVID-19 vaccine adjuvanted, or Oxford-AstraZeneca ChAdOx1 nCoV-19 vaccine (AZD1222).

33. The method of claim 30, wherein the previously received COVID vaccine comprises an S antigen or a coding sequence for an S antigen only.

34. The method of claim 30, wherein the subject has received the previous vaccination at least 1 month, at least 2 months, at least 3 months, at least 4 months, at least 4 months, at least 5 months, at least 6 months, at least 7 months, at least 8 months, at least 9 months, at least 10 months, at least 11 months, or at least 12 months prior to administration of the composition.
